(19) United States
(12) Patent Application Publication
(10) Pub. No.: US 2013/0316351 A1
(43) Pub. Date: Nov. 28, 2013

(54) METHODS AND KITS FOR DIAGNOSING CONDITIONS RELATED TO HYPOXIA

(71) Applicant: Osnat Ashur-Fabian, Zur Moshe (IL)

(72) Inventor: Osnat Ashur-Fabian, Zur Moshe (IL)

(21) Appl. No.: 13/702,851

(22) PCT Filed: Jun. 6, 2011
(86) PCT No.: PCT/IL2011/000444

§ 371 Date: Feb. 28, 2013

Related U.S. Application Data
(60) Provisional application No. 61/352,019, filed on Jun. 7, 2010.

(51) Int. Cl. C12Q 1/68

(52) U.S. Cl. CPC C12Q 1/6886; C12Q 1/6883
USPC 435/6.12

(57) ABSTRACT

The present invention provides a method for detecting a condition associated with hypoxia in a subject, a method for determining the severity of a condition associated with hypoxia, a method for determining the effectiveness of a therapeutic treatment of a condition associated with hypoxia and a method for selecting a subject suffering from a condition associated with hypoxia, to receive therapeutic treatment, wherein the methods of the invention are based on measuring the level of a cell free Ribonucleic acid (RNA) of a p53 inducible gene in the subject. The present invention is also directed to kits for performing the method of the invention.

### FIELD OF THE INVENTION

[0001] The invention relates to methods for detecting conditions associated with hypoxia in particular cerebrovascular accident, fetal stress and cardiovascular diseases.

### BACKGROUND OF THE INVENTION

[0002] Tissue hypoxia is a pathological condition in which tissue cells are deprived of adequate oxygen supply. When this occurs, normal biological processes in the cell are compromised in order to metabolically adapt to the oxygen deficiency. Oxygen-deprivation leads to the up-regulation of genes associated with numerous processes, such as vascularization and glycolysis, including erythropoietin and vascular endothelial growth factor.

[0003] Ischemia is defined as inadequate blood supply (circulation) to a local area due to blockage of the blood vessels to the area. This, in turn, leads to tissue hypoxia or anoxia (absence of oxygen). Ischemia always results in hypoxia; however, hypoxia can occur without ischemia if, for example, the oxygen content of the arterial blood decreases as occurs with anemia. Ischemic heart disease (IHD), or myocardial ischemia, is a disease characterized by ischaemia to the heart muscle, usually due to coronary artery disease (atherosclerosis of the coronary arteries). An estimated 14 million people in the United States have ischemic heart disease. Of these, as many as 4 million have few or no symptoms and are unaware that they are at risk for angina (angina pectoris) or heart attack (myocardial infarction).

[0004] p53 (also known as protein 53 or tumor protein 53), is a tumor suppressor protein that in humans is encoded by the TP53 gene (Matlashewski G, ET AL. Embo J. (1984), 3(13): 3257-62). p53 is important in multicellular organisms, where it regulates the cell cycle and thus functions as a tumor suppressor that is involved in preventing cancer. The activation of the p53 gene results in the transcriptional elevation of many target genes, including Apaf-1 and p21, some of which by 30 to 50 fold (Kannan et al., Oncogene (2001) 20(26):3449-55; Kannan et al., Oncogene, 2001; 20(18):2225-34).

[0005] Wild-type p53 protein is referred to as having a guardian-like role because it is responsible for monitoring the cellular state and responding to stress by inducing either a cell cycle arrest or apoptosis. Recent data shows that, although hypoxia-induced p53 does not transactivate known target genes, such as Apaf-1 or Perp, it binds to the promoters of these genes (Sumiyoshi Y, et al. Clin Cancer Res, 2006; 12: 5112-7). Other studies show that cellular levels of p53 are stabilized during hypoxia (Hammond E M et al. Clin Cancer Res (2006) 12(17):5007-5009).

[0006] Previous work showed that placentas of pregnancies complicated by fetal growth retardation, such as preeclampsia, exhibit enhanced apoptosis and up-regulation of p53 compared to normal pregnancies (Levy et al., Am J Obstet Gynecol (2002) 186(5):1056-61).

[0007] Ferguson-Smith has documented that small numbers of nucleated fetal cells, such as fetal trophoblasts, as well as cell-free fetal DNA pass into the maternal circulation. In preeclampsia the number of nucleated fetal cells and cell-free fetal DNA are increased, the latter even before clinical signs are apparent. Fetal DNA levels increase during pregnancy and are cleared in a matter of hours after delivery (Ferguson-Smith, Proc Nati Acad Sci USA, 2003; 100(8):4360-2). Similarly, fetal DNA can be detected in small amounts in the maternal circulation (Lo Y M, Corbetta N, Chamberlain P F, Rai V, Sargent I L, Redman C W, et al. Lancet, 1997; 350: 485-7). Thus, circulating nucleic acids can be found in the plasma and serum. The nucleic acids can be RNA, mitochondrial DNA or genomic DNA. Both DNA (at 1.8-35 ng mL-1) and RNA (2.5 ng mL-1) are found in the plasma and serum of healthy individuals and their levels rise in patients with various cancers, trauma, myocardial infarction and stroke.

[0008] Poon and colleagues have demonstrated for the first time, using a two-step reverse transcriptase (RT)-PCR assay, the presence of fetal-derived, male specific mRNA in plasma of pregnant women carrying male fetuses providing a means of noninvasive prenatal diagnosis (Poon et al., Clin Chem, 2000; 46(11):1832-4).

[0009] Circulating nucleic acids have also been shown to be useful as prognostic and predictive markers in patients with solid neoplasias (Goebel G, Dis Markers, 2005; 21(3):105-20). Cheng T, et al, reported that circulating c-met is an independent negative prognostic indicator in non-small cell lung cancer (Chest, 2005; 128: 1453-60).

[0010] Measurement of plasma circulating mRNA has been reported to enable early detection of hepatic injury (Kudo Y, et al., J Vet Med Sci, 2008; 70: 993-5).

[0011] Earlier studies concerning the existence of circulating nucleic acids in plasma and serum were mainly directed to the field of fetal medicine and oncology.

[0012] To date, circulating nucleic acids related studies involve other pathological states including trauma, sepsis, myocardial infarction, stroke, transplantation, diabetes mellitus and hematologic disorders (Butt and Swaminathan, Ann N Y Acad Sci. 2008; 1137:236-42). By introducing the highly sensitive one-step real-time quantitative reverse-transcription (RT)-polymerase chain reaction (PCR), circulating free RNA, which often only exists at low concentrations in plasma and serum, can be readily detected and quantified (Nancy B. Y, et al. Methods In Molecular Biology, 2006 Volume 336; pp: 123-134).

[0013] Corrias M V, et al, reported on the detection of cell-free RNA in children with neuroblastoma (NB) and comparison with that of whole blood cell RNA and suggested that for monitoring disease status detection of cell-free tumor-specific RNAs in patients with NB is not a reliable alternative to whole cell RNA. (Pediatr Blood Cancer, 2010; 54:897-903).

### BRIEF DESCRIPTION OF THE DRAWINGS

[0014] The invention is herein described, by way of example only, with reference to the accompanying drawings. With specific reference now to the drawings in detail, it is stressed that the particulars shown are by way of example and for purposes of illustrative discussion of the preferred embodiments of the present invention only, and are presented in the cause of providing what is believed to be the most useful and readily understood description of the principles and conceptual aspects of the invention:

[0015] FIG. 1 is a graph showing p21 gene levels in normal versus hypoxic pregnancies. Results are depicted in triplicates and normalized to beta-actin level for each sample.

[0016] FIG. 2 is a graph showing p21 levels in normal (N) versus hypoxic pregnancies (H). Results are depicted in triplicates and normalized to beta-actin level in each sample.

### SUMMARY OF THE INVENTION

[0017] In one of its aspects the present invention provides a method for detecting a condition associated with hypoxia in a subject, the method comprising determining in a biological sample obtained from the subject the level of a cell free Ribonucleic acid (RNA) of at least one p53 inducible gene, wherein a level of the cell free RNA above or below a predetermined range associated with the at least one p53 inducible gene, is indicative that the subject has a condition associated with hypoxia.

[0018] In another one of its aspects the present invention provides a method for determining the severity of a condition associated with hypoxia in a subject comprising determining the level of a cell free RNA of at least one p53 inducible gene in a biological sample obtained from the subject and comparing the level of the cell free RNA of the p53 inducible gene with a predetermined range that correlates the level of the at least one p53 inducible gene with the severity of the condition associated with hypoxia, the comparison allowing determination of the severity of the condition associated with hypoxia in the subject.

[0019] In still another one of its aspects the present invention provides a method for determining the effectiveness of a therapeutic treatment of a condition associated with hypoxia in a subject comprising determining the level of cell free RNA of at least one p53 inducible gene in two or more biological samples obtained from the subject at two or more time points, at least one of the time points being during or after the treatment, wherein:
[0020] (i) for a p53 inducible gene that is over-expressed in a condition associated with hypoxia a decrease in the level of the cell free RNA of the p53 inducible gene between the two or more samples being indicative of effectiveness of the therapeutic treatment;
[0021] (ii) for a p53 inducible gene that is repressed in a condition associated with hypoxia an increase in the level of the cell free RNA of the p53 inducible gene between the two or more samples being indicative of effectiveness of the therapeutic treatment.

[0022] In still yet another one of its aspects the present invention provides a method for selecting a subject suffering from a condition associated with hypoxia, to receive therapeutic treatment to treat the condition, the method comprising determining the level of cell free RNA of at least one p53 inducible gene in a biological sample obtained from the subject and selecting the subject to receive said therapeutic treatment if the level of cell free RNA of at least one p53 inducible gene is above or below a predetermined range associated with the at least one p53 inducible gene.

### LIST OF EMBODIMENTS

[0023] Disclosed below are some non-limiting embodiments of the invention, provided in the form of numbered paragraphs. A method for detecting a condition associated with hypoxia in a subject, the method comprising determining in a biological sample obtained from the subject the level of a cell free Ribonucleic acid (RNA) of at least one p53 inducible gene, wherein a level of the cell free RNA above or below a predetermined range associated with the at least one p53 inducible gene, is indicative that the subject has a condition associated with hypoxia.
[0024] 1. A method for detecting a condition associated with hypoxia in a subject, the method comprising determining in a biological sample obtained from the subject the level of a cell free Ribonucleic acid (RNA) of at least one p53 inducible gene, wherein a level of the cell free RNA above or below a predetermined range associated with the at least one p53 inducible gene, is indicative that the subject has a condition associated with hypoxia
[0025] 2. A method for determining the severity of a condition associated with hypoxia in a subject comprising determining the level of a cell free RNA of at least one p53 inducible gene in a biological sample obtained from the subject and comparing the level of the cell free RNA of the p53 inducible gene with a predetermined range that correlates the level of the at least one p53 inducible gene with the severity of the condition associated with hypoxia, the comparison allowing determination of the severity of the condition associated with hypoxia in the subject.
[0026] 3. A method for determining the effectiveness of a therapeutic treatment of a condition associated with hypoxia in a subject comprising determining the level of cell free RNA of at least one p53 inducible gene from two or more biological samples obtained from the subject at two or more time points, at least one of the time points is during or after the treatment, wherein:
   [0027] (i) for a p53 inducible gene that is over-expressed in a condition associated with hypoxia a decrease in the level of the cell free RNA of the p53 inducible gene between the two or more samples being indicative of effectiveness of the therapeutic treatment;
   [0028] (ii) for a p53 inducible gene that is repressed in a condition associated with hypoxia an increase in the level of the cell free RNA of the p53 inducible gene between the two or more samples being indicative of effectiveness of the therapeutic treatment.
[0029] 4. The method of Embodiment 3, wherein one or more first samples are taken at a time point prior to initiation of the treatment and one or more second samples are taken at a time point during or after the treatment.
[0030] 5. The method of Embodiment 3, wherein one or more first samples are taken at a time point during the treatment and one or more second samples are taken at a time point during the treatment subsequent to the time point of the one or more first samples.
[0031] 6. The method of Embodiment 3, wherein one or more first samples are taken at a time point during the treatment and one or more second samples are taken at a time point after the treatment has been discontinued.
[0032] 7. A method for selecting a subject suffering from a condition associated with hypoxia, to receive therapeutic treatment to treat the condition, the method comprising determining the level of cell free RNA of at least one p53 inducible gene in a biological sample obtained from the subject and selecting the subject to receive said therapeutic treatment if the level of cell free RNA of at least one p53 inducible gene is above or below a predetermined range associated with the at least one p53 inducible gene.
[0033] 8. A kit for performing a method according to any one of Embodiments 1 to 7, comprising at least one reagent for amplifying a cell free RNA of at least one p53 inducible gene from a biological sample, and instructions for performing the method of any one of claims 1 to 7.
[0034] 9. The kit of Embodiment 8, wherein said at least one reagent comprises a primer or a probe for specifically hybridizing with said at least one p53 inducible gene.
[0035] 10. The kit of Embodiments 8 or 9, said kit further comprising at least one reagent for extracting cell-free RNA from a biological sample
[0036] 11. The method of any one of Embodiments 1 to 7 or kit of any one of Embodiments 8 to 10, wherein said sample is a bodily fluid sample.
[0037] 12. The method or kit of Embodiment 11, wherein said bodily fluid sample is a blood sample.
[0038] 13. The method or kit of Embodiments 11, wherein said sample is a serum sample.
[0039] 14. The method or kit of Embodiment 11, wherein said sample is a plasma sample.
[0040] 15. The method of any one of Embodiments 1 to 7 or kit of any one of Embodiments 8 to 10, wherein the level of cell free RNA of at least one p53 inducible gene is determined by RT-PCR.
[0041] 16. The method or kit of Embodiment 15, wherein said RT-PCR is real-time quantitative RT-PCR.
[0042] 17. The method of any one of Embodiments 1 to 7 or kit of any one of Embodiments 8 to 10, wherein the condition associated with hypoxia is selected from cardiovascular diseases, cancer, cerebrovascular accident (CVA) and fetal stress.
[0043] 18. The method or kit of Embodiment 17, wherein the condition associated with hypoxia is fetal stress.
[0044] 19. The method or kit of Embodiment 17, wherein the cardiovascular diseases is myocardial infarction.
[0045] 20. The method or kit of Embodiments 18 or 19, wherein the at least one p53 inducible gene is selected from TP53 (GeneBank Accession No. Nm_{—}000546), p21 (GeneBank Accession No. Nm_{—}000389), ERCC5 (GeneBank Accession No. Nm_{—}000123), MDM2 (GeneBank Accession No. Nm_{—}0006878), TP53I3 (GeneBank Accession No. Nm_{—}004881), NOTCH1 (GeneBank Accession No. Nm_{—}017617), PIGF (GeneBank Accession No. Nm_{—}002643), BTG2 (GeneBank Accession No. Nm_{—}006763), ZMAT3 (GeneBank Accession No. Nm_{—}0022470), APAF1 (GeneBank Accession No. Nm_{—}013229), FAS (GeneBank Accession No. Nm_{—}152873), ANGPTL2 (GeneBank Accession No. Nm_{—}012098), PUMA (GeneBank Accession No. Nm_{—}014417), IGFBP6 (GeneBank Accession No. Nm_{—}002178), GDF15 (GeneBank Accession No. Nm_{—}004864), BNIP3L (GeneBank Accession No. Nm_{—}004331.2), TGFβ33 (GeneBank Accession No. Nm_{—}003239), VEGF (GeneBank Accession No. Nm_{—}001025366) and HIF-1α.
[0046] 21. The method or kit of Embodiment 20, wherein the at least one p53 inducible gene is selected from p21 (GeneBank Accession No. Nm_{—}000389), BTG2 (GeneBank Accession No. Nm_{—}006763), HIF-1α (GeneBank Accession No. Nm_{—}001530), NOTCH1 (GeneBank Accession No. Nm_{—}017617), TGFβ3 (GeneBank Accession No. Nm_{—}003239) and ZMAT3 (GeneBank Accession No. Nm_{—}0022470).

[0047] 22. The method or kit of Embodiment 20, wherein the at least one p53 inducible gene is p21 (GeneBank Accession No. Nm_{—}000389).
[0048] 23. The method or kit of Embodiment 20, wherein the at least one p53 inducible gene is BTG2 (GeneBank Accession No. Nm_{—}006763).

### DETAILED DESCRIPTION OF SOME NON-LIMITING EMBODIMENTS

[0049] The present invention is based on the finding that a change in the concentration of cell free RNA of various p53 inducible genes, particularly in the blood, is correlated with various conditions associated with hypoxia, such as fetal stress (reflected by low oxygen levels measured in the fetus), preeclampsia, ischemic heart disease, stroke (cerebrovascular accident (CVA)) and myocardial infarction.

[0050] Thus, without wishing to be bound by theory, hypoxia is known to affect p53 and p53 inducible gene expression levels.

[0051] Based on the above, the inventors of this invention have envisaged that cell free RNA can be used as a valid diagnostic tool for predicting various diseases associated with hypoxia.

[0052] The present invention also contemplates a tool for assessing the effectiveness of treatment of a condition associated with hypoxia based on the difference in the level of cell free RNA of various p53 inducible genes before and after treatment of the condition associated with hypoxia.

[0053] Thus, in accordance with a first of its aspects, there is provided a method for detecting a condition associated with hypoxia in a subject, the method comprising detecting in a biological sample obtained from the subject the level of a cell free Ribonucleic acid (RNA) of at least one p53 inducible gene, wherein a level of the cell free RNA above or below a predetermined range associated with the at least one p53 inducible gene, is indicative that the subject has a condition associated with hypoxia.

[0054] As used herein the term “detecting” refers to quantitative as well as qualitative determination of the presence or absence of cell free RNA in a biological sample obtained from a subject. The detection thus allows determining the existence (or non-existence) of a pathological condition associated with hypoxia (e.g. myocardial ischemia; acute (first few hours to 7 days), healing (7 to 28 days) and healed (29 days and beyond) stages of myocardial infarction) in a subject, based upon the level of the cell free RNA in the biological sample obtained from a subject.

[0055] As used herein the term “condition associated with hypoxia” refers to a condition in which oxygen level is reduced below a pre-determined normal physiological level or range in an organ or tissue, generally as a result of reduced blood flow to the organ. This reduction in blood flow may result from the following non-limiting circumstances: (i) blockage of a vessel by an embolus (blood clot); (ii) blockage of a vessel due to atherosclerosis; (iii) breakage of a blood vessel (a bleeding stroke); (iv) blockage of a blood vessel due to vasoconstriction such as occurs during vasospasms and possibly, during transient ischemic attacks (TIA) and following subarachnoid hemorrhage. Hypoxia according to the present teachings may be chronic or transient.

[0056] Conditions which are associated with hypoxia may include, but are not limited to, cerebrovascular accident (CVA), fetal stress (e.g. compromise of the fetus during the antepartum period (before labor) or intrapartum period (birth process); interchangeable with fetal hypoxia (low oxygen levels in the fetus)), cardiovascular diseases and conditions such as acute coronary syndromes, ischemic heart disease, myocardial ischemia (also known as ischemic heart disease), myocardial infarction (MI) (including all stages thereof, as described herein) cardiac surgery, neurosurgery, cerebral hypoxia, cerebral infarction, surgery (e.g., per-surgical hypoxia, post-operative hypoxia), trauma, pulmonary disease, pulmonary hypertension, chronic obstructive pulmonary disease (COPD), coronary artery disease, peripheral vascular disease [e.g., arteriosclerosis (atherosclerosis, transplant accelerated arteriosclerosis), deep vein thrombosis], cancer (such as but not limited to, cervical, colon, renal, lung, uterine, breast or pancreatic cell carcinoma, lymphoma, leukemia), angiogenesis and angiogenesis related disorders (such as but not limited to, diabetic retinopathy, macular degeneration, psoriasis and rheumatoid arthritis), renal failure, skeletal muscle ischemia, sleep apnea, hypoxia during sleep, viral infection, bacterial infection, smoking, anemia, hypovolemia, hemorrhage, hypertension, diabetes, vasculopathologies, Reynaud's disease, endothelial dysfunction, regional perfusion deficits (e.g., limb, gut, renal ischemia), thrombosis, frost bite, decubitus ulcers, asphyxiation, poisoning (e.g., carbon monoxide, heavy metal), altitude sickness, sudden infant death syndrome (SIDS), asthma, congenital circulatory abnormalities (e.g., Tetralogy of Fallot) and Erythroblastosis (blue baby syndrome).

[0057] As used herein the term “biological sample” refers to any sample obtained from a subject. Preferable, such a sample is a bodily fluid. Samples which qualify include, but are not limited to, blood, plasma, serum, amniotic fluid, sputum, saliva, semen, urine, feces, bone marrow and cerebrospinal fluid (CSF). The term “serum” refers to the fluid portion of the blood obtained after removal of the fibrin clot and blood cells, distinguished from the plasma in circulating blood. The term “plasma” refers to the fluid, non-cellular portion of the blood, distinguished from the serum obtained after coagulation. In some embodiments biological sample is selected from sputum or saliva. The samples are typically treated to remove therefrom cellular fractions, i.e. to become a cell free RNA sample, as further discussed below.

[0058] Procedures for obtaining biological samples from subjects are well known in the art. Such procedures include, but are not limited to, blood sampling, amniocentesis, chorionic villus sampling and urine collection.

[0059] As used herein, “subject” refers to any warm-blooded animal, particularly including a member of the class mammalian such as, without limitation, humans and non-human primates such as chimpanzees and other apes and monkey species; farm animals such as cattle, sheep, pigs, goats and horses; domestic mammals such as dogs and cats; laboratory animals including rodents such as mice, rats and guinea pigs, and the like. The term does not denote a particular age or sex and, thus, includes adult and newborn subjects, whether male or female. The subject in the context of the invention is preferably a human subject.

[0060] As used herein the phrase “cell free ribonucleic acid (RNA)” (also called circulating RNA or ciRNA) refers to such RNA (e.g. mRNA) present within the cell-free fraction of a sample. The cell-free RNA described herein is not comprised in intact cells (i.e., comprising uncompromised plasma membrane) but is typically associated with particles (e.g. placenta-derived syncytiotrophoblast microparticles, see Rusterholz et al., supra; or apoptotic bodies, see Hasselmann et al., Clin Chem (2001) 47:1488-1489). In some embodiments the cell-free RNA is intact (i.e. not fragmented).

[0061] Cell-free RNA samples may be extracted from the biological sample according to any method known in the art (see general materials and methods section of the Examples section). For instance, after obtaining the biological sample (i.e. blood) the sample is prepared as was previously described (see for Example Ng et al., supra). Briefly, all nucleated cells are removed from the sample by two centrifugation cycles (e.g. at 1,600×g for 10 minutes at 4° C.). The resultant cell-free sample (e.g. plasma or serum) is transferred to a clean tube (e.g. eppendorf tube), mixed with TRIzol LS reagent (Invitrogen, Carlsbad, Calif.) plus chloroform and centrifuged (e.g. at 11,900×g for 15 minutes at 4° C.). The aqueous layer is transferred into a new tube and mixed with 70% ethanol (at a 1:1 ratio). The mixture is then transferred to an RNeasy minicolumn (RNeasy mini kit, Qiagen, Valencia, Calif.) according to the manufacturer's recommendations and total RNA is eluted in RNase-free water.

[0062] The quantification of cell free RNA, according to the present invention can be achieved by any methods or kits employing such methods known in the art. Some none limiting examples of such methods include reverse transcription-polymerase chain reaction (RT-PCR), real-time RT-PCR (such as TaqMan® and Assays-on-Demand™, (Applied Biosystems, Foster City, Calif., USA), Molecular Beacons, Scorpions® and SYBR® Green (Molecular Probes)), plasma/serum circulating RNA purification kits (such as Norgen's; www.norgenbiotek.com) and RNA microarray. In some embodiments the cell free RNA is further normalized against several housekeeping genes (e.g. beta-actin, GAPDH, CypA, HPRT, Ki-67, SDHA, HPRT1, HBS1L, AHSP, beta-2-microglobulin) in order to provide a more accurate measurement of the cell free RNA in the biological sample. Reagents for carrying out RNA quantification typically comprise at least one primer and/or probe for specifically hybridizing with the at least one p53 inducible gene. As used herein, the term “specifically hybridizing” refers to forming a double strand molecule such as RNA:RNA, RNA:DNA and/or DNA:DNA molecules.

[0063] Amplifying and/or detecting the cell-free RNA of a specific gene typically involve the use of at least one sequence specific oligonucleotide (see general materials and methods section of the Examples section which follows). The oligonucleotides may be of at least 10, at least 15, at least 20, at least 25, or at least 30 bases specifically hybridizable with polynucleotide sequences of the present invention.

[0064] Detection of hybrid duplexes can be carried out using a number of methods, including by sequence specific probes (e.g. MGB-probes). Typically, a label or tag is attached (conjugated) to the probe. Such labels or tags are of standard use in the art and include radioactive, fluorescent, biological or enzymatic tags or labels.

[0065] Traditional hybridization assays include PCR, RT-PCR, RNase protection; in-situ hybridization, primer extension, Northern Blot and dot blot analysis (see Examples section hereinbelow).

[0066] Examples of specific primers and probes suitable for the detection of certain p53 inducible genes are provided in the Examples section below. Any person skilled in the art would be able to generate suitable primers and probes based on the available gene sequences provided herein or available in the art using methods well known in the art.

[0067] As used herein the term “p53 inducible gene” refers to a gene wherein the expression of the gene is regulated either directly or indirectly by protein 53 (p53). In some embodiments regulation of the gene by p53 occurs by mean of transcriptional regulation whereby the change in the gene's expression level depends on transcription rates of the gene (e.g. by affecting transcription initiation). When the gene is regulated at the transcription level the p53 protein may regulate the expression of the gene by binding to a DNA binding site which is sometimes located near the promoter of the gene or by binding of a regulatory binding site to switch the gene on (i.e. activate the gene) or to shut off a gene (i.e. repress the gene). In some embodiments, regulation of the gene occurs at the level of one or more of post-transcriptional modification (e.g. glycosylation, acetylation, fatty acylation, disulfide bond formations, etc.), RNA transport, RNA translation (e.g. translation initiation), protein transport, protein stability, mRNA degradation (i.e. transcript Stability), affecting a chromatin component of the gene (e.g. affect accessibility of the chromatin to RNA polymerases and transcription factors).

[0068] As used herein the term “predetermined range associated with the at least one p53 inducible gene” generally refers to a concentration range of p53 inducible genes which defines the level of cell free RNA measured in samples obtained from healthy subjects not suffering from any condition associated with hypoxia, i.e. normal, control, hypoxia-unaffected samples. Such a control sample is typically obtained from a subject of the same age range, physiological state (e.g., pregnancy) and gender. Under certain circumstances it may even be derived of the same subject prior to the state of hypoxia, e.g. in subjects that are susceptible to developing a condition associated with hypoxia (e.g. before pregnancy). In some embodiments the predetermined range is a concentration range of p53 inducible genes which defines the level of cell free RNA measured from samples obtained from subjects in various stages of a condition associated with hypoxia (e.g. for MI—acute, healing or healed stages of myocardial infarction, as described herein). The predetermined range may be determined experimentally (e.g. by sampling cell free RNA from blood obtained from MI patients) or derived from the literature if available.

[0069] Thus, according to the present invention, the level of the cell free RNA measured to be statistically different (i.e. above or below) from a predetermined concentration range, as defined above, of at least one p53 inducible gene, is indicative that the subject has a condition associated with hypoxia.

[0070] In some embodiments the condition associated with hypoxia is selected from fetal stress, arteriosclerotic vascular disease, myocardial ischemia, myocardial infarction, unstable angina, sudden cardiac death, coronary plaque rupture, or thrombosis in all stages of their occurrence.

[0071] As used herein, the term “ischemia” refers to a condition which involves insufficient supply of blood to an organ, usually due to a blocked artery. As used herein, the term “myocardial ischemia” refers to a disorder of cardiac function caused by insufficient blood flow to the muscle tissue of the heart. Ischemia can be silent or symptomatic. The decreased blood flow may, for example, be due to narrowing of the coronary arteries (coronary arteriosclerosis), to obstruction by a thrombus (coronary thrombosis), or less commonly, to diffuse narrowing of arterioles and other small vessels within the heart. As used herein, the term “myocardial infarction (MI)” (also known as acute myocardial infarction (AMI) or heart attack), refers to the irreversible necrosis of heart muscle secondary to prolonged ischemia. Typically, a myocardial infarction is caused by an occlusion or blockage of arteries supplying the muscles of the heart and results in injury or necrosis of the heart muscle (i.e. heart attack). In the context of the present invention myocardial infarction refers to any stage of the disease (e.g. acute, healing or healed stages of myocardial infarction, as described herein). As used herein, the term “fetal stress” refers to any condition in which the fetus is at risk of developing a pregnancy related complication. Fetal stress includes, without being limited to, inadequate nutrient supply and cessation of fetal growth. Fetal stress may affect fetal development and brain functions and plays a significant role in pregnancy outcomes related to prematurity and urgent deliveries (e.g. c-section). Conditions associated with fetal stress include, but are not limited to, abnormal pregnancy, fetal hypoxia, fetal stress, intrauterine growth retardation (IUGR), fetal growth restriction (FGR), fetal alcohol syndrome (FAS), nicotine intake, alcohol intake, inadequate nutrition, maternal diabetes, advanced maternal age and excessive maternal exercise. Additional examples of pregnancy associated hypoxic conditions associated with fetal stress are exemplified in detail hereinabove.

[0072] In some embodiments the fetal stress, as defined herein, is associated with hypoxia being related to a pregnancy associated hypoxic condition such as preeclampsia, eclampsia, mild preeclampsia, chronic hypertension, EPH gestosis, gestational hypertension, superimposed preeclampsia (including preeclampsia superimposed on chronic hypertension, chronic nephropathy or lupus), HELLP syndrome (hemolysis, elevated liver enzymes, low platelet count), nephropathy, gestational diabetes, placental hypoxia, fetal hypoxia, intrauterine growth retardation (IUGR), fetal growth restriction (FGR), fetal alcohol syndrome (FAS).

[0073] In some embodiments, the at least one p53 inducible gene is selected from p21 (GeneBank Accession No. U09579), VEGF (GeneBank Accession No. NM_{—}001025366), HIF1α (GeneBank Accession No. NM_{—}001530.2), MDM2 (EST=MDM2, GeneBank Accession No. M92424) and TP53I3 (GeneBank Accession No. NM_{—}147184.1), Fas antigen/TNFR6 (GeneBank Accession No. X89101), TNFR18 (GeneBank Accession No. AI923712), Gelsolin (GeneBank Accession No. X04412), btg1 (GeneBank Accession No. X61123), EST=PIG8 (Etoposide induced, GeneBank Accession No. R11732), T10 mRNA/human sentrin/SUMO (GeneBank Accession No. U83117), Apaf1 (GeneBank Accession No. AL135220), ANGL2, EST=Angiopoietin like (GeneBank Accession No. AF125175), and cytosolic adenylate kinase (GeneBank Accession No. J04809), S100 calcium-binding protein A4 (GeneBank Accession No. M80563), cyclin G2 (GeneBank Accession No. U47414), EST=Ras inhibitor Rin1 (GeneBank Accession No. L36463), B-cell translocation gene 2, anti-proliferative (GeneBank Accession No. U72649), ERCC5 (GeneBank Accession No. AW502004), H2B and H2A histone genes (291A, GeneBank Accession No. Z83336), Notch gene homolog 1, (Drosophila GeneBank Accession No. AI566271), Eph receptor A2 (GeneBank Accession No. M59371), hepatocyte growth factor-like protein gene (GeneBank Accession No. U37055) and EST=Alpha-L Fucosidase precursor (GeneBank Accession No. M29877), Mannosidase 2, alpha B1 (GeneBank Accession No. U37248), phosphomannomutase Sec53p homolog (GeneBank Accession No. U86070), Spermidine (GeneBank Accession No. U40369), peroxisomal integrel membrane protein PMP34 (GeneBank Accession No. AI871429), hypothetical protein/human Cubilin (GeneBank Accession No. AF034611), Arginosuccinate synthetase 1 (GeneBank Accession No. AA069289), Lipocortin 1/human Annexin A1 (GeneBank Accession No. ASW379702), EST=Xanthine dehydrogenase (GeneBank Accession No. U39487) and EST=Prostaglandin synthase (GeneBank Accession No. M98539), Biotin Carboxylase/human neuronal acidic protein (GeneBank Accession No. AI422580), Ly-6 alloantigen/human dihydropyrimidinase (GeneBank Accession No. D78014), neural visinin-like protein 3 (NVP-3, GeneBank Accession No. AI391924), EST=Aryl-hydrocarbon receptor interacting protein (GeneBank Accession No. U78521), PIGF, Phosphatidylinositol glycan, class F 3A (GeneBank Accession No. WO15279), EST=UNC-51 like kinase 1 (GeneBank Accession No. AL046256), DNA for tob family/transducer of ERBB2 (GeneBank Accession No. D38305), TYRO protein tyrosine kinase binding protein (GeneBank Accession No. AI299346), p53-inducible zinc finger protein (Wig-1/ZMAT3) mRNA (GeneBank Accession No. AI457344) and friend of GATA-1 (FOG) 1 (GeneBank Accession No. AF488691), T-complex-associated testis expressed 3 (GeneBank Accession No. AA781436), Selenium binding protein 1 (GeneBank Accession No. U29091), EST=BPM1/human Plectin 1 (GeneBank Accession No. Z54367), EST=Vamp2/human synaptobrevin 2 (GeneBank Accession No. M36205), Fas/APO-1 cell surface antigen (GeneBank Accession No. X63717), Bcl-2 binding component 3 (bbc3/PUMA, GeneBank Accession No. U82987), Bcl-6 (GeneBank Accession No. U00115), Bak (GeneBank Accession No. U16811), ATL derived PMA responsive peptide (GeneBank Accession No. D90070) and GADD45 (GeneBank Accession No. M60974), BTG2 (GeneBank Accession No. U72649), Damage-specific DNA binding protein (GeneBank Accession No. U18300), Histone 2A-like protein (GeneBank Accession No. U90551), PCNA (GeneBank Accession No. M15796), Endoglin (GeneBank Accession No. X72012), Versican (GeneBank Accession No. U16306), Heavy chain 4F2 (GeneBank Accession No. M21904), SMAD7 (GeneBank Accession No. AF010193), TGF-Beta Superfamily protein (GeneBank Accession No. AB000584) and IGFBP6 (GeneBank Accession No. M62402), Quiescin/QSCN6 (GeneBank Accession No. L42379), Adipophilin (GeneBank Accession No. X97324), Multiple exostoses type II protein (GeneBank Accession No. U72263), Vascular smooth muscle alpha-actin (GeneBank Accession No. X13839), Smoothelin (GeneBank Accession No. Z49989), Neurofilament subunit NF-L (GeneBank Accession No. X05608), NB Thymosin beta (GeneBank Accession No. D82345), LIM domain protein (GeneBank Accession No. X93510), Lysyl oxidase-like protein (GeneBank Accession No. U24389) and UDP-Galactose 4 Epimerase (GALE, GeneBank Accession No. L38668), cAMP activated Protein Kinase B (GeneBank Accession No. Y12556), Lysosomal Mannosidase alpha B (GeneBank Accession No. U05572), Carboxylesterase (liver, GeneBank Accession No. Y09616), ABC3 (GeneBank Accession No. U78735), Apolipoprotein C-I (VLDL, GeneBank Accession No. M20902), CART (GeneBank Accession No. U20325), Lecithin-cholesterol acyltransferase (GeneBank Accession No. M12625), Rhodanese (GeneBank Accession No. D87292), NECDIN related protein (GeneBank Accession No. U35139) and NSCL-2 gene (GeneBank Accession No. M96740), FEZI-T gene (GeneBank Accession No. U60062), Ninjurin 1 (GeneBank Accession No. U72661), Amyloid precursor-like protein (GeneBank Accession No. U48437), c-Ha-ras (GeneBank Accession No. J00277), Intestinal VIPR related protein (GeneBank Accession No. X77777), Diacylglycerol Kinase (alpha, GeneBank Accession No. X62535), Putative ser/thr protein kinase (GeneBank Accession No. U56998), DM Kinase (GeneBank Accession No. L08835), DRAL-FHL2 (GeneBank Accession No. L42176) and Activating transcription factor 3 (GeneBank Accession No. L19871), ZNF127-Xp (GeneBank Accession No. U38315), LISCH7 (GeneBank Accession No. AD000684), Zinc finger protein 7 (GeneBank Accession No. M29580), Tip-1 (GeneBank Accession No. U90913), Nuclear factor NF-116 (GeneBank Accession No. HG3494), POM-ZP3 (GeneBank Accession No. U10099), KIAAA0247 (GeneBank Accession No. D87434), Mammaglobin 1 (GeneBank Accession No. U33147), Disulfide isomerase related protein (GeneBank Accession No. J05016) and OS4 (GeneBank Accession No. U81556), Infertility-related sperm protein (GeneBank Accession No. S58544), KIAA0147 (GeneBank Accession No. D63481), SURF-1 (GeneBank Accession No. Z35093), WD repeat protein HAN11 (GeneBank Accession No. U94747), p53-induced gene 3 (PIG3, GeneBank Accession No. AF010309), MIC-1/GDF15, member of TGF-L family (GeneBank Accession No. AF019770), DDB2, involved in nucleotide excision repair (GeneBank Accession No. U18300a), MYD88, myeloid differentiation (GeneBank Accession No. U70451a), Retinoic acid receptor L (GeneBank Accession No. X07282) and Fas/APO1 (GeneBank Accession No. Z70519), MAPK14 (GeneBank Accession No. L35253), Bcl2-associated X protein (Bax, GeneBank Accession No. L22474), FKBP4 (possible peptidyl-prolyl-cis-trans-isomerase, GeneBank Accession No. M88279), Mitochondrial stress 70 precursor (Mortalin2, GeneBank Accession No. L15189a), p57KIP2 (CDK inhibitor 1C, GeneBank Accession No. U22398), DNA ligase 1 (LIG1, GeneBank Accession No. M36067), DNA excision repair-related 1 (ERCC5, GeneBank Accession No. L20046a), G/T mismatch thymine DNA glycosylase (TDG, GeneBank Accession No. U51166), Homeobox protein 1 (HOXD3, GeneBank Accession No. D111117a) and MAP4K5 (activator of Jun N-terminal kinase, GeneBank Accession No. U77129, Replication factor A protein 1 (RPA1, GeneBank Accession No. M63488), Bc12 antagonist/killer 1 (BAK1, GeneBank Accession No. U23765), TGF-L inducible early growth response gene (TIEG, GeneBank Accession No. S81439a), MAP2K1 (MEK1 1.5 Kinase, GeneBank Accession No. L05624), Chondroitin sulfate proteoglycan 2 (CSPG2, GeneBank Accession No. U16306a) and Zinc finger protein 197 (p18 protein, ZNF197, GeneBank Accession No. Z21707a), Adenylate Kinase 3 (GeneBank Accession No. J04809), Aldolase A (GeneBank Accession No. NM_{—}000034), Aldolase C (GeneBank Accession No. NM_{—}0051654), Enolase 1 (ENOL, GeneBank Accession No. NM_{—}001428), Glucose Transporter 1 (GeneBank Accession No. NM_{—}153369), Glucose Transporter 3 (GeneBank Accession No. NM_{—}001009770), Glyceraldehyde-3-phosphate Dehydrogenase (GeneBank Accession No. NM_{—}002046), Hexokinase 1 (GeneBank Accession No. Nm_{—}000188×) and Hexokinase 2 (GeneBank Accession No. Nm_{—}000189X), Insulin-like Growth Factor 2 (IGF-2, GeneBank Accession No. NM_{—}000612), IGF Binding Protein 1 (IGFBP-1, GeneBank Accession No. uc001gkz.1), IGFBP-3 (GeneBank Accession No. uc003tnr.1), Lactate Dehydrogenase A (GeneBank Accession No. NM_{—}005566), Phosphoglycerate Kinase 1 (GeneBank Accession No. NM_{—}000291), Pyruvate Kinase M (GeneBank Accession No. M23725), Transforming Growth Factor β3 (TGF β3, GeneBank Accession No. uc001doh.1), Ceruloplasmin (GeneBank Accession No. NM_{—}000096), Erythropoietin (GeneBank Accession No. NM_{—}000799), Transferrin (GeneBank Accession No. NM_{—}001063) and Transferrin Receptor (GeneBank Accession No. NM_{—}003234), α1B-Adrenergic Receptor (GeneBank Accession No. NM_{—}000679), Adrenomedullin (GeneBank Accession No. NM_{—}001124), Endothelin-1 (GeneBank Accession No. NM_{—}001101696), Heme Oxygenase 1 (GeneBank Accession No. NM_{—}002133), Nitric Oxide Synthase 2 (GeneBank Accession No. uc002gzu.1) and VEGF Receptor FLT-1 (GeneBank Accession No. NM_{—}001025366) and BCL2/adenovirus E1B 19 kd-interacting protein 3-like (BNIP3L, GeneBank Accession No. NM_{—}004331.2.

[0074] In some embodiments the p53 inducible genes are selected from TP53, P21, ERCC5, MDM2, TP53I3 (PIG3), NOTCH, PIGF, BTG2, ZMAT3 (WIG1), APAF1, FAS, ANGPTL2, PUMA (BBC3), IGFBP6, GDF15, BNIP3L, TGF-133, VEGF, HIF1α as depicted in Table 1 and are quantified using the TaqMan® Gene Expression Assays (Applied Biosystems) also as shown in Table 1, or using equivalent commercial or designed primer/probe sets, as recognized by the skilled artisan.

[0075] In some embodiments the p53 inducible genes are selected from TP53, P21, ERCC5, MDM2, TP53I3 (PIG3), NOTCH, PIGF, BTG2, ZMAT3 (WIG1), APAF1, FAS, ANGPTL2, PUMA (BBC3), IGFBP6, GDF15, BNIP3L, TGF-β3, VEGF, HIF1α as depicted in Table 3 and are quantified using the Assays-on-Demand™, Applied Biosystems also as shown in Table 3, or using equivalent commercial or designed primer/probe sets, as recognized by the skilled artesian.

TABLE 1
p53 inducible genes

| | Gene symbol | Accession # | SEQ ID NO | Assay # |
|---|---|---|---|---|
| 1 | TP53 | Nm_000546 | SEQ ID NO: 16 | Hs01034249_m1 |
| 2 | P21 (CDKN1A) | Nm_000389 | SEQ ID NO: 17 | Hs01121168_m1 |
| 3 | ERCC5 | Nm_000123.2 | SEQ ID NO: 18 | Hs01557031_m1 |
| 4 | MDM2 | Nm_006878 | SEQ ID NO: 19 | Hs00234753_m1 |
| 5 | TP53I3 (PIG3) | Nm_004881 | SEQ ID NO: 20 | Hs00153280_m1 |
| 6 | NOTCH1 | Nm_017617 | SEQ ID NO: 21 | Hs00413187_m1 |
| 7 | PIGF | Nm_002643 | SEQ ID NO: 22 | Hs00601696_m1 |
| 8 | BTG2 | Nm_006763 | SEQ ID NO: 23 | Hs00198887_m1 |
| 9 | ZMAT3 (WIG1) | Nm_022470 | SEQ ID NO: 24 | Hs01074692_m1 |
| 10 | APAF1 | Nm_013229 | SEQ ID NO: 25 | Hs00185508_m1 |
| 11 | FAS | Nm_152873 | SEQ ID NO: 26 | Hs00910107_m1 |
| 12 | ANGPTL2 | Nm_012098 | SEQ ID NO: 27 | Hs00765775_m1 |
| 13 | PUMA (BBC3) | Nm_014417 | SEQ ID NO: 28 | Hs00248075_m1 |
| 14 | IGFBP6 | Nm_002178 | SEQ ID NO: 29 | Hs00181853_m1 |
| 15 | GDF15 | Nm_004864 | SEQ ID NO: 30 | Hs00171132_m1 |
| 16 | BNIP3L | NM_004331.2 | SEQ ID NO: 31 | Hs00188949_m1 |
| 16 | TGFβ3 | Nm003239 | SEQ ID NO: 32 | Hs00234245_m1 |
| 17 | VEGF | Nm_001025366 | SEQ ID NO: 33 | Hs99999070_m1 |
| 18 | HIF1a | Nm_001530 | SEQ ID NO: 34 | Hs00936372 |

TABLE 2
Primers and probes

| Gene | Forward | Reverse | MGB- |
|---|---|---|---|
| name | primer | primer | probe |
| p21 | CTGGAGACTCT | CGGCGTTTGG | CAGACCAG |
| GeneBank | CAGGGTCGAA | AGTGGTAGA | CATGACAG |
| Accession | (SEQ ID | (SEQ ID | (SEQ ID |
| No. U09579 | NO: 1) | NO: 2) | NO: 3) |
| MDM2 | GACTCCAAGC | ACATGTTGGTAT | CGGATGGT |
| GeneBank | GCGAAAACC | TGCACATTTGC | GAGGAGC |
| Accession | (SEQ ID | (SEQ ID | (SEQ ID |
| No. M92424 | NO: 4) | NO: 5) | NO: 6) |
| VEGF | CTACCTCCACC | TGCGCTGATAG | AGGCTGCA |
| GeneBank | ATGCCAAGTG | ACATCCATGA | CCCATG |
| Accession No. | (SEQ ID | (SEQ ID | (SEQ ID |
| NM_001025366 | NO: 7) | NO: 8) | NO: 9) |
| HIF1α | GCATCTTG | CCATCCAA | AGCTATT |
| GeneBank | ATAAGGCC | GGCTTTCA | TGCGTGT |
| Accession | TCTGTGA | AATAAAA | GAGGA |
| No. | (SEQ ID | (SEQ ID | (SEQ ID |
| NM_001530.2 | NO: 10) | NO: 11) | NO: 12) |
| TP53I3 | GCAACGCTGAA | TAGGATCCGCCT | TGCTGGAGT |
| GeneBank | ATTCACCAAA | ATGCAGTCTAG | TAATCTTAT |
| Accession No. | (SEQ ID | (SEQ ID | (SEQ ID |
| NM_147184.1 | NO: 13) | NO: 14) | NO: 15) |

TABLE 3
Assays-on-Demand ™, Applied Biosystems

| | | | | | | Assay |
|---|---|---|---|---|---|---|
| | | | | | Fold | location |
| | | | | | increase by | (Exon-Exon |
| | Gene symbol | Accession # | SEQ ID NO: | Assay # | p53 | boundaries) |
| 1 | TP53 | Nm_000546 | SEQ ID NO: 16 | Hs01034249_m1 | — | |
| 2 | p21 (CDKN1A) | Nm_0003891 | SEQ ID NO: 17 | Hs01121168_m1 | 21 | 1-2 |
| 3 | ERCC5 | Nm_000123.2 | SEQ ID NO: 18 | Hs01557031_m1 | 58 | 1-2 |
| 4 | MDM2 | Nm_006878 | SEQ ID NO: 19 | Hs00234753_m1 | 14 | 1-2 |
| 5 | TP53I3 (PIG3) | Nm_004881 | SEQ ID NO: 20 | Hs00153280_m1 | 11 | 4-5 |
| 6 | NOTCH1 | Nm_017617 | SEQ ID NO: 21 | Hs00413187_m1 | 26 | 4-5 |
| 7 | PIGF | Nm_002643 | SEQ ID NO: 22 | Hs00601696_m1 | 15 | 1-2 |
| 8 | BTG2 | Nm_006763 | SEQ ID NO: 23 | Hs00198887_m1 | 10 | 1-2 |
| 9 | ZMAT3 | Nm_022470 | SEQ ID NO: 24 | Hs01074692_m1 | 24 | 2-3 |
| | (WIG1) | | | | | |
| 10 | APAF1 | Nm_013229 | SEQ ID NO: 25 | Hs00185508_m1 | 7 | 18-19 |
| 11 | FAS | Nm_152873 | SEQ ID NO: 26 | Hs00910107_m1 | 54 | 3-4 |
| 12 | ANGPTL2 | Nm_012098 | SEQ ID NO: 27 | Hs00765775_m1 | 37 | 3-4 |
| 13 | PUMA(BBC3) | Nm_014417 | SEQ ID NO: 28 | Hs00248075_m1 | 30 | 3-4 |
| 14 | IGFBP6 | Nm_002178 | SEQ ID NO: 29 | Hs00181853_m1 | 30 | 1-2 |
| 15 | GDF15 | Nm_004864 | SEQ ID NO: 30 | Hs00171132_m1 | 32 | 1-2 |
| 16 | BNIP3L | Nm_004331.2 | SEQ ID NO: 31 | Hs00188949_m1 | 16 | 2-3 |
| 17 | TGFB3 | Nm_003239 | SEQ ID NO: 32 | Hs00234245_m1 | p53- | 1-2 |
| | | | | | associated | |
| 18 | VEGF | Nm_001025366 | SEQ ID NO: 33 | Hs99999070_m1 | p53- | 3-3 |
| | | | | | assocoated | |
| 19 | HIF1a | Nm_001530 | SEQ ID NO: 34 | Hs00936372 | p53- | 2-3 |
| | | | | | associated | |

[0076] In accordance with a further aspect, the present invention provides a method for determining the severity of a condition associated with hypoxia in a subject comprising determining the level of a cell free RNA of at least one p53 inducible gene in a biological sample obtained from the subject and comparing the level of the cell free RNA of the p53 inducible gene with a predetermined value (which may be a discrete number of a range) that correlates with the level of the at least one p53 inducible gene with the severity of the a condition associated with hypoxia, the comparison allowing determination of the severity of the condition associated with hypoxia in the subject.

[0077] In accordance with a further aspect, there is provided by the present invention a method for determining the effectiveness of a therapeutic treatment of a condition associated with hypoxia in a subject comprising determining the level of cell free RNA of at least one p53 inducible gene from two or more biological samples obtained from the subject, at two or more successive time points, at least one of the time points is during or after the treatment, wherein:
[0078] (i) for a p53 inducible gene that is over-expressed in a condition associates with hypoxia, a decrease in the level of the cell free RNA of the p53 inducible gene between the two or more samples, is indicative of effectiveness of the therapeutic treatment;
[0079] (ii) for a p53 inducible gene that is repressed in a condition associates with hypoxia, an increase in the level of the cell free RNA of the p53 inducible gene between the two or more samples, is indicative of effectiveness of the therapeutic treatment.

[0080] As used herein the term “effectiveness of a therapeutic treatment” refers to the assessment of the success of treating a subject having a condition associate with hypoxia (e.g. myocardial infarction) by measuring the improvement in the health condition of the subject being treated for a condition associate with hypoxia. In accordance with the present invention, the assessment of the subject's medical health can be carried out using any acceptable medical test/procedure known in the art.

[0081] In some embodiments, the effectiveness of a therapeutic treatment is manifested by the return of at least one p53 inducible gene expression level to a normal gene expression level, namely the level of expression of said at least one p53 inducible gene measured in a control (e.g. a healthy subject being measured or a measurement previously obtained from a healthy subject).

[0082] As used herein a “decrease” or “increase” in the level of the cell free RNA of the p53 inducible gene refers to a statistically significant decrease or increase as measured in accordance with the invention. The determination of a statistically significant decrease or increase may be conducted using any commonly used statistical test. Those skilled in the art would know how to select the most appropriate statistical test for conducting the determination of a statistically significant decrease or increase in the level of the cell free RNA of the p53 inducible gene. In one embodiment, the test is the Chi-square test. In another embodiment the test is a t-test. In still another embodiment the test is a Mann-Whitney test.

[0083] Thus, for example, a first serum or plasma sample is obtained from a subject suffering from acute chest pain, upon admission to the hospital (e.g. between arrival at the hospital and before the beginning of a catheterization procedure or any other procedure or treatment used to treat myocardial infarction such as anti-platelet medicines, nitroglycerin, angiotensin converting enzyme inhibitors, beta-blocking agents) and additional samples are taken sequentially every few hours or days to monitor the effectiveness of the treatment (e.g. catheterization procedure or any other treatment used to cure myocardial infarction as described herein) given to the hospitalized subject.

[0084] In some embodiments, the additional samples are taken at daily (and/or hourly) intervals in the time period of between 1 to 30 days after the beginning of the treatment (e.g. catheterization procedure).

[0085] In some embodiments, the additional samples are taken between 3 to 6 hours after the beginning of the treatment (e.g. catheterization procedure).

[0086] In one embodiment, the additional samples are taken about 4 hours after the beginning of the treatment (e.g. catheterization procedure).

[0087] In some embodiments, the effectiveness of treatment is further determined by comparing the level of cell free RNA of at least one p53 inducible gene from two or more biological samples obtained from the subject, as described herein, to the RNA level of at least one p53 inducible gene obtained from a control (e.g. healthy subject) In accordance with such embodiments the effectiveness of a therapeutic treatment is assessed by comparing gene expression values of at least one p53 inducible gene, as defined herein, in subjects undergoing treatment of having completed treatment (e.g. MI patient 3 to 6 hours after a catheterization procedure), with gene expression values of at least one p53 inducible gene in a control sample (e.g. healthy subjects).

[0088] Cell free RNA is measured in these samples and the level of at least one p53 inducible gene is compared between the samples to determine the effectiveness of the treatment of the subject. In some embodiments the concentration of the cell free RNA of the at least one p53 inducible gene is also compared to a reference control sample taken from healthy individuals of similar gender, weight and age. In accordance with the present invention a reference control may also be obtained from a cell line (e.g. A2780 human ovarian cancer cell line).

[0089] In some embodiments, one or more first samples are taken at a time point prior to initiation of treatment and one or more second samples are taken at a time point during or after the treatment. In one embodiment the second sample is taken between 3 to 6 hours after treatment. In one embodiment the treatment is catheterization.

[0090] In some embodiments the one or more first samples are taken at a time point during the treatment and one or more second samples are taken at a time point during the treatment subsequent to the time point of the one or more first samples.

[0091] In some embodiments the one or more first samples are taken at a time point during the treatment and one or more second samples are taken at a time point after the treatment has been discontinued.

[0092] The one or more first samples are then compared with the one or more second samples to determine the difference between expressions of the p53 inducible gene, the comparison allowing determination of treatment effectiveness, as described herein.

[0093] In accordance with a third of its aspects, there is provided a method for selecting a subject suffering from a certain condition associated with hypoxia, to receive therapeutic treatment to treat the condition, the method comprising determining the level of cell free RNA of at least one p53 inducible gene in a biological sample obtained from the subject and selecting the subject to receive said therapeutic treatment if the level is above or below a predetermined range associated with the at least one p53 inducible gene.

[0094] In accordance with a fourth of its aspects, there is provided a kit for performing any of the methods defined herein, the kit comprising at least one reagent for amplifying a cell free RNA of at least one p53 inducible gene from a biological sample, and instructions for performing the method of the invention. In certain embodiments, the kit further comprises at least one reagent for extracting cell-free RNA from a biological sample.

[0095] In some embodiments, the at least one reagent for amplifying the cell free RNA comprises a primer or a probe for specifically hybridizing with said at least one p53 inducible gene.

[0096] In some embodiments the method of the invention comprises the steps of:
[0097] a) extracting cell free RNA from a biological sample obtained from the subject,
[0098] b) quantifying the level of the cell free RNA of at least one p53 inducible gene,
[0099] c) comparing the level of cell free RNA obtained in step b to a predetermined concentration range of the at least one p53 inducible gene and/or to a reference control.

[0100] In some embodiments, the condition associated with hypoxia is fetal stress.

[0101] In some embodiments, the condition associated with hypoxia is myocardial infarction.

[0102] In some embodiments the at least one p53 inducible gene is selected from TP53 (GeneBank Accession No. Nm_{—}000546), p21 (GeneBank Accession No. Nm_{—}000389), ERCC5 (GeneBank Accession No. Nm_{—}000123), MDM2 (GeneBank Accession No. Nm_{—}0006878), TP53I3 (GeneBank Accession No. Nm_{—}004881), NOTCH1 (GeneBank Accession No. Nm_{—}017617), PIGF (GeneBank Accession No. Nm_{—}002643), BTG2 (GeneBank Accession No. Nm_{—}006763), ZMAT3 (GeneBank Accession No. Nm_{—}0022470), APAF1 (GeneBank Accession No. Nm_{—}013229), FAS (GeneBank Accession No. Nml 52873), ANGPTL2 (GeneBank Accession No. Nm_{—}012098), PUMA (GeneBank Accession No. Nm_{—}014417), IGFBP6 (GeneBank Accession No. Nm_{—}002178), GDF15 (GeneBank Accession No. Nm_{—}004864), BNIP3L (GeneBank Accession No. Nm_{—}004331.2), TGFβ3 (GeneBank Accession No. Nm_{—}003239), VEGF (GeneBank Accession No. Nm_{—}001025366) and HIF-1α. In some embodiments the at least one p53 inducible gene is selected from p21 (GeneBank Accession No. Nm_{—}000389), BTG2 (GeneBank Accession No. Nm_{—}006763), HIF-1α (GeneBank Accession No. Nm_{—}001530), NOTCH1 (GeneBank Accession No. Nm_{—}017617), TGFβ3 (GeneBank Accession No. Nm_{—}003239) and ZMAT3 (GeneBank Accession No. Nm_{—}0022470).

[0103] In one embodiment, the primers or probes used to detect said cell free RNA of the p53 inducible genes are the primers or probes depicted in Table 2 or are primers and probes selected by the skilled artisan from primer and probes for said genes which are known from the art.

[0104] In some embodiments, the primers or probes used to detect said cell free RNA of the p53 inducible genes are the primers or probes depicted in Table 3 or are primers and probes selected by the skilled artesian from primers and probes for said genes which are known from the art.

[0105] In some embodiments the at least one p53 inducible gene is selected from p21, BTG2, TGFβ3, NOTCH1, HIF1α, MDM2 and ZMAT3.

[0106] In one embodiment the at least one p53 inducible gene is p21.

[0107] In another embodiment the at least one p53 inducible gene is BTG2.

[0108] Unless otherwise defined, all technical and/or scientific terms used herein have the same meaning as commonly understood by one of ordinary skill in the art to which the invention pertains. Although methods and materials similar or equivalent to those described herein can be used in the practice or testing of embodiments of the invention, exemplary methods and/or materials are described below. In case of conflict, the patent specification, including definitions, will control. In addition, the materials, methods, and examples are illustrative only and are not intended to be necessarily limiting.

[0109] Various embodiments and aspects of the present invention as delineated hereinabove and as claimed in the claims section below find experimental support in the following examples.

### DESCRIPTION OF SOME NON-LIMITING EXAMPLES

[0110] Reference is now made to the following examples, which together with the above description; illustrate the invention in a non limiting fashion.

[0111] Generally, the nomenclature used herein and the laboratory procedures utilized in the present invention include molecular, biochemical, microbiological and recombinant DNA techniques. Such techniques are thoroughly explained in the literature. See, for example, “Molecular Cloning: A laboratory Manual” Sambrook et al., (1989); “Current Protocols in Molecular Biology” Volumes I-III Ausubel, R. M., ed. (1994); Ausubel et al., “Current Protocols in Molecular Biology”, John Wiley and Sons, Baltimore, Md. (1989); Perbal, “A Practical Guide to Molecular Cloning”, John Wiley & Sons, New York (1988); Watson et al., “Recombinant DNA”, Scientific American Books, New York; Birren et al. (eds) “Genome Analysis: A Laboratory Manual Series”, Vols. 1-4, Cold Spring Harbor Laboratory Press, New York (1998); methodologies as set forth in U.S. Pat. Nos. 4,666,828; 4,683,202; 4,801,531; 5,192,659 and 5,272,057; “Cell Biology: A Laboratory Handbook”, Volumes I-III Cellis, J. E., ed. (1994); “Current Protocols in Immunology” Volumes I-III Coligan J. E., ed. (1994); Stites et al. (eds), “Basic and Clinical Immunology” (8th Edition), Appleton & Lange, Norwalk, Conn. (1994); Mishell and Shiigi (eds), “Selected Methods in Cellular Immunology”, W. H. Freeman and Co., New York (1980); available immunoassays are extensively described in the patent and scientific literature, see, for example, U.S. Pat. Nos. 3,791,932; 3,839,153; 3,850,752; 3,850,578; 3,853,987; 3,867,517; 3,879,262; 3,901,654; 3,935,074; 3,984,533; 3,996,345; 4,034,074; 4,098,876; 4,879,219; 5,011,771 and 5,281,521; “Oligonucleotide Synthesis” Gait, M. J., ed. (1984); “Nucleic Acid Hybridization” Hames, B. D., and Higgins S. J., eds. (1985); “Transcription and Translation” Hames, B. D., and Higgins S. J., Eds. (1984); “Animal Cell Culture” Freshney, R. I., ed. (1986); “Immobilized Cells and Enzymes” IRL Press, (1986); “A Practical Guide to Molecular Cloning” Perbal, B., (1984) and “Methods in Enzymology” Vol. 1-317, Academic Press; “PCR Protocols: A Guide To Methods And Applications”, Academic Press, San Diego, Calif. (1990); Marshak et al., “Strategies for Protein Purification and Characterization—A Laboratory Course Manual” CSHL Press (1996); all of which are incorporated by reference as if fully set forth herein. Other general references are provided throughout this document. The procedures therein are believed to be well known in the art and are provided for the convenience of the reader. All the information contained therein is incorporated herein by reference.

### General Materials and Methods

[0112] Blood Collection from Pregnant Women:

[0113] 15 ml blood samples were collected from healthy women with singleton (i.e. pregnancy with a single fetus) uncomplicated pregnancies and from women with complicated pregnancies. The study was approved by the Research Ethics Committee of the Sheba Medical Center. All blood samples were acquired in the Department of Obstetrics and Gynecology at the Sheba Medical Center following informed consent of the subjects.

[0114] Blood Preparation:

[0115] Blood samples were prepared as was previously described by Ng [Ng et al., Proc Natl Acad Sci (2003) 100(8):4360-2]. In detail, the blood samples were collected in EDTA-containing tubes centrifuged at 1,600×g for 10 minutes at 4° C. (to remove nucleated cells from the blood sample). Plasma and serum were then carefully transferred into 1.5 ml eppendorf tubes. The plasma samples were re-centrifuged at 16,000×g for 10 minutes at 4° C. and the supernatants were collected into fresh polypropylene tubes. The serum samples were stored at −20° C. for future reference.

[0116] RNA Extraction:

[0117] 1.6 ml plasma (subsequent to centrifugation) was mixed with 2 ml TRIzol LS reagent (Invitrogen, Carlsbad, Calif.) and 0.4 ml chloroform as was previously described by Ng [Ng et al., Clin Chem (2002) 48(8):1212-7]. The mixture was centrifuged at 11,900×g for 15 minutes at 4° C. and the aqueous layer was transferred into new tubes. One volume of 70% ethanol was added to one volume of the aqueous layer. The mixture was then transferred to an RNeasy minicolumn (RNeasy mini kit, Qiagen, Valencia, Calif.) following the manufacturer's recommendations. On-column DNase treatment was carried out to remove any contaminating DNA (RNase-Free DNase Set, Qiagen, Valencia, Calif.). Total RNA was eluted in 30 μl RNase-free water and stored at −80° C.

[0118] Real-Time Quantitative RT-PCR:

[0119] Amplification of specific cell free mRNA was conducted using a one-step real-time quantitative RT-PCR with specific primers directed at each gene of interest. RT-PCR primers were intron spanning, to reduce DNA contamination, and a NCBI-blast check was done to rule out non-specific amplifications.

[0120] RT-PCRs were set up according to the manufacturer's instructions (EZ rTth RNA PCR reagent set, Applied Biosystems, Foster City, Calif.) in a reaction volume of 20 μl. In detail, 5 μl extracted plasma RNA was amplified using 100-500 nM PCR primers. Each sample was analyzed in duplicates and the corresponding calibration curves were processed simultaneously in triplicates for each analysis. No template control (NTC) was also included in every analysis.

[0121] The RT-PCR thermal profile used in accordance with the present invention was as follows: The reaction was initiated at 50° C. for 20 minutes reverse transcription and a 5 minute denaturation at 95° C. Next, 50 cycles of PCR were carried out as follows: 15 seconds of denaturation at 95° C. followed by 30 seconds of annealing/extension at 60° C.

[0122] Blood Collection from Patients Suffering from Myocardial Infarction:

[0123] For analyzing the level of cell free RNA in patients suffering from myocardial infarction (MI), an assay kit from Applied Biosystems was used (Assays-on-Demand™, Table 3). The assay uses a collection of pre-designed primer and probe sets for quantitative real-time PCR gene expression studies.

[0124] RNA was extracted by magnetic beads (Magmax kit, by Applied Biosystems; AM1836) and used in a one step RT-PCR kit (QuantiFast Probe RT-PCR Plus Kit from QIAGEN; 204482). Quantification of RNA was carried out in accordance with a relative quantification method as explained below.

### Example 1

### p21 mRNA is Elevated in the Serum of Complicated Hypoxic Pregnancies as Compared to Normal Pregnancies

### Results

[0125] Results indicated that p21 gene expression is highly elevated in complicated hypoxic pregnancies (FIG. 1). Positive p21 gene expression was observed in four out of the five RNA samples obtained from subjects with complicated pregnancies, whereas no p21 gene expression was observed in the five samples obtained from subjects with normal pregnancies.

[0126] In a further study, p21 gene expression was tested in 20 RNA samples of normal pregnancies and results were compared to the elevated p21 gene expression observed in complicated pregnancies (as depicted FIG. 1). As illustrated in FIG. 2, p21 gene expression was highly elevated in only one out of the twenty cases of normal pregnancies tested (case number 19) while a minor elevation was detected in four cases (cases number 1, 7, 13 and 17).

[0127] Altogether the present results substantiate circulating p21 mRNA as a non-invasive marker for predicting fetal stress.

### Example 2

[0128] Up-Regulation in RNA Expression of p21, MDM2 and HIF1α in Plasma Samples of Women with Complicated Hypoxic Pregnancies as Determined in a Broad Clinical Study

### Results

[0129] Following the initial results (as depicted in Example 1), the study was extended to a larger group of subjects (54 subjects in total), of these, 31 normal pregnancy subjects and 23 complicated pregnancy subjects. Maternal plasma RNA samples were tested for gene expression of genes associated with hypoxia and stress, specifically, p21 (GeneBank Accession No. U09579), VEGF (GeneBank Accession No. NM_{—}001025366), MDM2 (GeneBank Accession No. M92424), HIF1α (GeneBank Accession No. NM_{—}001530.2) and TP53I3 (GeneBank Accession No. NM_{—}147184.1) using primers and probes as shown in Table 2.

[0130] As depicted in Table 4A below, out of 23 hypoxic pregnancy subjects tested 13 were tested positive for p21 gene expression and 10 were recorded negative for p21 gene expression. Furthermore, out of 31 normal pregnancy subjects tested only 2 were tested positive for p21 gene expression and 29 were recorded negative for p21 gene expression. Chi-square test results of p21 gene expression in hypoxic pregnancies versus normal pregnancies depicted p was smaller that 0.001 (Table 4B).

TABLE 4A
p21 gene expression
H/N * p21 Crosstabulation

p21

| | | | − | + | Total |
|---|---|---|---|---|---|
| H/N | H | Count | 10 | 13 | 23 |
| | | % within H/N | 43.5% | 56.5% | 100.0% |
| | | % within p21 | 25.6% | 86.7% | 42.6% |
| | N | Count | 29 | 2 | 31 |
| | | % within H/N | 93.5% | 6.5% | 100.0% |
| | | % within p21 | 74.4% | 13.3% | 57.4% |
| Total | | Count | 39 | 15 | 54 |
| | | % within H/N | 72.2% | 27.8% | 100.0% |
| | | % within p21 | 100.0% | 100.0% | 100.0% |

TABLE 4B
Chi-square test
Chi-Square Tests

| | | | Asymp. Sig. | Exact Sig. | Exact Sig. |
|---|---|---|---|---|---|
| | Value | df | (2-sided) | (2-sided) | (1-sided) |
| Pearson Chi-Square | 16.500^{b} | 1 | .000 | | |
| Continuity Correc- | 14.099 | 1 | .000 | | |
| tion^{a} | | | | | |
| Likelihood Ratio | 17.487 | 1 | .000 | | |
| Fisher's Exact Test | | | | .000 | .000 |
| N of Valid Cases | 54 | | | | |

^{a}Computed only for a 2 × 2 table
^{b}0 cells (.0%) have expected count less than 5. The minimum expected count is 6.39.

[0131] As depicted in Table 5A below, out of 23 hypoxic pregnancy subjects tested 10 were tested positive for VEGF gene expression and 13 were recorded negative for VEGF gene expression. Furthermore, out of 31 normal pregnancy subjects tested 6 were tested positive for VEGF gene expression and 25 were recorded negative for VEGF gene expression. Chi-square test results of VEGF gene expression in hypoxic pregnancies versus normal pregnancies depicted p=0.053 (Table 5B).

TABLE 5A
VEGF gene expression
H/N * vegf Crosstabulation

vegf

| | | | − | + | Total |
|---|---|---|---|---|---|
| H/N | H | Count | 13 | 10 | 23 |
| | | % within H/N | 56.5% | 43.5% | 100.0% |
| | | % within vegf | 34.2% | 62.5% | 42.6% |
| | N | Count | 25 | 6 | 31 |
| | | % within H/N | 80.6% | 19.4% | 100.0% |
| | | % within vegf | 65.8% | 37.5% | 57.4% |
| Total | | Count | 38 | 16 | 54 |
| | | % within H/N | 70.4% | 29.6% | 100.0% |
| | | % within vegf | 100.0% | 100.0% | 100.0% |

TABLE 5B
Chi-square test
Chi-Square Tests

| | | | Asymp. Sig. | Exact Sig. | Exact Sig. |
|---|---|---|---|---|---|
| | Value | df | (2-sided) | (2-sided) | (1-sided) |
| Pearson Chi-Square | 3.685^{b} | 1 | .055 | | |
| Continuity Correc- | 2.619 | 1 | .106 | | |
| tion^{a} | | | | | |
| Likelihood Ratio | 3.676 | 1 | .055 | | |
| Fisher's Exact Test | | | | .074 | .053 |
| N of Valid Cases | 54 | | | | |

^{a}Computed only for a 2 × 2 table
^{b}0 cells (.0%) have expected count less than 5. The minimum expected count is 6.81.

[0132] As depicted in Table 6A below, out of 22 hypoxic pregnancy subjects tested 12 were tested positive for MDM2 gene expression and 10 were recorded negative for MDM2 gene expression. Furthermore, out of 31 normal pregnancy subjects tested only were tested positive for MDM2 gene expression and 26 were recorded negative for MDM2 gene expression. Chi-square test results of MDM2 gene expression in hypoxic pregnancies versus normal pregnancies depicted p=0.004 (Table 6B).

TABLE 6A
MDM2 gene expression
H/N * mdm2 Crosstabulation

| | | | mdm2 | | |
|---|---|---|---|---|---|
| | | | − | + | Total |
| H/N | H | Count | 10 | 12 | 22 |
| | | % within H/N | 45.5% | 54.5% | 100.0% |
| | | % within mdm2 | 27.8% | 70.6% | 41.5% |
| | N | Count | 26 | 5 | 31 |
| | | % within H/N | 83.9% | 16.1% | 100.0% |
| | | % within mdm2 | 72.2% | 29.4% | 58.5% |
| Total | | Count | 36 | 17 | 53 |
| | | % within H/N | 67.9% | 32.1% | 100.0% |
| | | % within mdm2 | 100.0% | 100.0% | 100.0% |

TABLE 6B
Chi-square test
Chi-Square Tests

| | | | Asymp. Sig. | Exact Sig. | Exact Sig. |
|---|---|---|---|---|---|
| | Value | df | (2-sided) | (2-sided) | (1-sided) |
| Pearson Chi-Square | 8.717^{b} | 1 | .003 | | |
| Continuity Correc- | 7.042 | 1 | .008 | | |
| tion^{a} | | | | | |
| Likelihood Ratio | 8.800 | 1 | .003 | | |
| Fisher's Exact Test | | | | .006 | .004 |
| N of Valid Cases | 53 | | | | |

^{a}Computed only for a 2 × 2 table
^{b}0 cells (.0%) have expected count less than 5. The minimum expected count is 7.06.

[0133] As depicted in Table 7A below, out of 22 hypoxic pregnancy subjects tested 10 were tested positive for HIF1α gene expression and 12 were recorded negative for HIF1α gene expression. Furthermore, out of 31 normal pregnancy subjects tested 0 were tested positive for HIF1α gene expression and 31 were recorded negative for HIF1α gene expression. Chi-square test results of HIF1α gene expression in hypoxic pregnancies versus normal pregnancies depicted p was smaller that 0.001 (Table 7B).

TABLE 7A
HIF1α gene expression
H/N * hif1a Crosstabulation

hif1a

| | | | − | + | Total |
|---|---|---|---|---|---|
| H/N | H | Count | 12 | 10 | 22 |
| | | % within H/N | 54.5% | 45.5% | 100.0% |
| | | % within hif1a | 27.9% | 100.0% | 41.5% |
| | N | Count | 31 | 0 | 31 |
| | | % within H/N | 100.0% | .0% | 100.0% |
| | | % within hif1a | 72.1% | .0% | 58.5% |
| Total | | Count | 43 | 10 | 53 |
| | | % within H/N | 81.1% | 18.9% | 100.0% |
| | | % within hif1a | 100.0% | 100.0% | 100.0% |

TABLE 7B
Chi-square test
Chi-Square Tests

| | | | Asymp. Sig. | Exact Sig. | Exact Sig. |
|---|---|---|---|---|---|
| | Value | df | (2-sided) | (2-sided) | (1-sided) |
| Pearson Chi-Square | 17.368^{b} | 1 | .000 | | |
| Continuity Correc- | 14.525 | 1 | .000 | | |
| tion^{a} | | | | | |
| Likelihood Ratio | 21.020 | 1 | .000 | | |
| Fisher's Exact Test | | | | .000 | .000 |
| N of Valid Cases | 53 | | | | |

^{a}Computed only for a 2 × 2 table
^{b}1 cells (25.0%) have expected count less than 5. The minimum expected count is 4.15.

[0134] As depicted in Table 8A below, out of 22 hypoxic pregnancy subjects tested 6 were tested positive for TP53I3 gene expression and 16 were recorded negative for TP53I3 gene expression. Furthermore, out of 23 normal pregnancy subjects tested 5 were tested positive for TP53I3 gene expression and 18 were recorded negative for TP53I3 gene expression. Chi-square test results of TP53I3 gene expression in hypoxic pregnancies versus normal pregnancies depicted p=0.466 (Table 8B).

TABLE 8A
TP53I3 gene expression
H/N * TP5313 Crosstabulation

| | | | TP5313 | | |
|---|---|---|---|---|---|
| | | | − | + | Total |
| H/N | H | Count | 16 | 6 | 22 |
| | | % within H/N | 72.7% | 27.3% | 100.0% |
| | | % within TP5313 | 47.1% | 54.5% | 48.9% |
| | N | Count | 18 | 5 | 23 |
| | | % within H/N | 78.3% | 21.7% | 100.0% |
| | | % within TP5313 | 52.9% | 45.5% | 51.1% |
| Total | | Count | 34 | 11 | 45 |
| | | % within H/N | 75.6% | 24.4% | 100.0% |
| | | % within TP5313 | 100.0% | 100.0% | 100.0% |

TABLE 8B
Chi-square test
Chi-Square Tests

| | | | Asymp. Sig. | Exact Sig. | Exact Sig. |
|---|---|---|---|---|---|
| | Value | df | (2-sided) | (2-sided) | (1-sided) |
| Pearson Chi-Square | .186^{b} | 1 | .666 | | |
| Continuity Correc- | .007 | 1 | .932 | | |
| tion^{a} | | | | | |
| Likelihood Ratio | .187 | 1 | .666 | | |
| Fisher's Exact Test | | | | .738 | .466 |
| N of Valid Cases | 45 | | | | |

^{a}Computed only for a 2 × 2 table
^{b}0 cells (.0%) have expected count less than 5. The minimum expected count is 5.38.

[0135] As illustrated in Table 9 below, correlating p21, MDM2 and HIF1α gene expressions in hypoxic pregnancies compared to normal pregnancies revealed that only 4 hypoxic pregnancy subjects were negative for expression of these 3 genes, whereas 24 normal pregnancy subjects were negative for expression of these 3 genes. Furthermore, 5 hypoxic pregnancy subjects were positive for expression of p21, MDM2 and HIF1α, whereas none of the normal pregnancy subjects were recorded positive.

TABLE 9
relationship between p21, MDM2 and HIF1α gene expressions
p21 * mdm2 * hif1a * H/N Crosstabulation
Count

mdm2

| H/N | hif1a | | | − | + | Total |
|---|---|---|---|---|---|---|
| H | − | p21 | − | 4 | 2 | 6 |
| | | | + | 3 | 3 | 6 |
| | | Total | | 7 | 5 | 12 |
| | + | p21 | − | 1 | 2 | 3 |
| | | | + | 1 | 5 | 6 |
| | | Total | | 2 | 7 | 9 |
| N | − | p21 | − | 24 | 5 | 29 |
| | | | + | 2 | 0 | 2 |
| | | Total | | 26 | 5 | 31 |

[0136] Similarly, as illustrated in Table 10 below, correlating p21, VEGF and HIF1α gene expressions in hypoxic pregnancies compared to normal pregnancies revealed that only 5 hypoxic pregnancy subjects were negative for expression of these 3 genes, whereas 23 normal pregnancy subjects were negative for expression of these 3 genes. Furthermore, 3 hypoxic pregnancy subjects were positive for expression of p21, VEGF and HIF1α, whereas none of the normal pregnancy subjects were recorded positive.

TABLE 10
relationship between p21, VEGF and HIF1α H/N gene expressions
p21 * vegf * hif1a * H/N Crosstabulation
Count

vegf

| H/N | hif1a | | | − | + | Total |
|---|---|---|---|---|---|---|
| H | − | p21 | − | 5 | 1 | 6 |
| | | | + | 3 | 3 | 6 |
| | | Total | | 8 | 4 | 12 |
| | + | p21 | − | 1 | 3 | 4 |
| | | | + | 3 | 3 | 6 |
| | | Total | | 4 | 6 | 10 |
| N | − | p21 | − | 23 | 6 | 29 |
| | | | + | 2 | 0 | 2 |
| | | Total | | 25 | 6 | 31 |

[0137] Summarizing the gene expression of the different hypoxia related genes in hypoxic pregnancies (Tables 11 and 12, below) revealed that p21 gene expression and/or HIF1α gene expression are the most notably upregulated genes in hypoxic pregnancies. Thus, expressions of both these genes, together or separately, among other p53 inducible genes that are over expressed or repressed in conditions associated with hypoxia, mark hypoxic stress during pregnancy.

TABLE 11
Model if Term Removed

| | | | Change | | |
|---|---|---|---|---|---|
| | | Model Log | in −2 Log | | Sig. of the |
| Variable | | Likelihood | Likelihood | df | Change |
| Step | p21 | −25.007 | 9.203 | 1 | .002 |
| 1 | vegf | −20.534 | .255 | 1 | .613 |
| | hif1a | −26.563 | 12.313 | 1 | .000 |
| Step | p21 | −25.459 | 9.851 | 1 | .002 |
| 2 | hif1a | −27.943 | 14.819 | 1 | .000 |

TABLE 12
Model if Term Removed

| | | | Change | | |
|---|---|---|---|---|---|
| | | Model Log | in −2 Log | | Sig. of the |
| Variable | | Likelihood | Likelihood | df | Change |
| Step | p21 | −22.518 | 9.008 | 1 | .003 |
| 1 | ercc5 | −18.054 | .081 | 1 | .776 |
| | mdm2 | −18.346 | .664 | 1 | .415 |
| | vegf | −18.279 | .530 | 1 | .466 |
| | hif1a | −21.930 | 7.832 | 1 | .005 |
| Step | p21 | −22.558 | 9.009 | 1 | .003 |
| 2 | mdm2 | −18.459 | .810 | 1 | .368 |
| | vegf | −18.330 | .553 | 1 | .457 |
| | hif1a | −21.966 | 7.825 | 1 | .005 |
| Step | p21 | −23.236 | 9.810 | 1 | .002 |
| 3 | mdm2 | −18.696 | .732 | 1 | .392 |
| | hif1a | −23.246 | 9.832 | 1 | .002 |
| Step | p21 | −24.152 | 10.911 | 1 | .001 |
| 4 | hif1a | −25.058 | 12.725 | 1 | .000 |

### Example 3

### p53-Induced Gene Activation in Patients Suffering from Acute Myocardial Infarction

### Study Subjects:

[0138] A group of 100 subjects participated in the study. Fifty subjects were patients having acute myocardial infarction (MI) hospitalized in the cardiac intensive care unit in Meir Hospital (Kfar Saba). All patients were men over 30 years old. Fifty subjects were patients undergoing non-invasive ischemic assessment which did not show an acute ischemia (the control group).

### MI Patients:

[0139] The MI patients suffered from acute MI accompanied by an ST segment elevation. The patients were hospitalized due to continuous chest pain that was reported to have occurred for at least 1 hour but no more than 6 hours. All MI patients were intended for urgent catheterization and demonstrated at least one of the following:
[0140] 1. elevated ST in anterior wall
[0141] 2. new Left bundle branch block (LBBB)
[0142] 3. ST elevation in posterior wall with evidence of an electrocardiographic involvement of a lateral or posterior wall

### Control Group:

[0143] The control group consisted of 50 patients undergoing non-invasive ischemic assessment using echocardiogram or an echocardiogram stress test which did not show an acute ischemia.

[0144] Blood samples were analyzed for the expression of the genes BNIP3L, P21, MDM2, HIF1α, NOTCH1, BTG2, TGFβ3, ZMAT3 and ERCC5. RNA was isolated from the patients and amplified. Quantification of cell free RNA in blood samples of patients was carried out in accordance with a relative quantification method (Livak K J and Schmittgen T D. Methods 2001; 25(4):402-8; Marisa L W and Juan F M, BioTechniques 2005; 39:75-85) which determines the changes in steady-state mRNA levels of a gene across multiple samples and expresses it relative to the levels of an internal control RNA. Total RNA extracted from A2780 (human ovarian cancer cell line) was used as external standard (calibrator) for relative quantification. The fold increase of the test samples as compared to the calibrator (i.e. RNA from the line A2780) was quantified. All the patient's RNA samples (after normalization to an internal control being GAPDH) were compared to the level of expression in the A2780 cell line.

### For the MI Group:

[0145] Two blood samples were taken:
[0146] 1. Upon arrival at the hospital (between the arrival time to the emergency unit and until catheterization), t=0;
[0147] 2. Four hours after catheterization; t=4.

### for the Control Group:

[0148] One blood sample was taken before performing the assay (echocardiogram or echocardiogram stress test).

### Statistical Analysis:

[0149] 1. A parametric t-test was conducted for cell free RNA levels at t=0 (in MI patient's) vs. control; t=4 (in MI patient's) vs. control and t=0 vs. t=4 (Table 13, results depict p-value; * p<0.05, ** p<0.01).

TABLE 13
t-test

| Gene | t = 0/control | t = 4/control | t = 0/t = 4 |
|---|---|---|---|
| BNIP3L | 0.3 | 0.37 | 0.16 |
| P21 | 0.0012** | 0.001** | 0.21 |
| MDM2 | 0.02* | 0.11 | 0.08 |
| HIF1-α | 0.0002*** | 0.00003 | 0.4 |
| NOTCH1 | 0.18 | 0.14 | 0.19 |
| BTG2 | 0.073 | 0.12 | 0.00004*** |
| TGF-β3 | N/A | N/A | N/A |
| ZMAT3 | N/A | N/A | N/A |
| ERCC5 | 0.07 | 0.06 | 0.4 |

[0150] 2. A Mann Whitney non-parametric statistical test (Wilcoxon rank-sum test) was carried out in cases where cell free RNA was not detected at t=0 and/or t=4 and/or in the control in some of the blood samples (Table 14, results depict p-value; * p<0.05, ** p<0.01, *** p<0.001)

TABLE 14
Mann-Whitney test

| Gene | t = 0/control | t = 4/control | t = 0/t = 4 |
|---|---|---|---|
| BNIP3L | N/A | N/A | N/A |
| P21 | 0.0007*** | 0.28 | 0.0017** |
| MDM2 | 0.14 | 0.5 | 0.08 |
| HIF1-α | 0.017* | 0.4 | 0.017* |
| NOTCH1 | 0.0024** | 0.14 | 0.0034** |
| BTG2 | 0.0002*** | 0.24 | 0.0001*** |
| TGF-β3 | 0.15 | 0.26 | 0.013* |
| ZMAT3 | 0.094 | 0.036* | 0.16 |
| ERCC5 | 0.11 | 0.44 | 0.08 |

[0151] The results reveal that the expression of the p21, MDM2, HIF-1α, NOTCH1, BTG2 genes is indicative of acute MI (Tables 13-14, left column). The genes p21, HIF-1α, NOTCH1, TGF-β3 and BTG2 were shown to be predictive markers for the success of treatment of MI (Tables 13-14, right column).

[0152] The genes p21, MDM2, HIF 1-α, NOTCH 1 and BTG2 were shown to be predictive markers for the return of gene expression to normal values, as depicted in the t=4 vs. control (middle columns in tables 13, 14).

[0153] It is appreciated that certain features of the invention, which are, for clarity, described in the context of separate embodiments, may also be provided in combination in a single embodiment. Conversely, various features of the invention, which are, for brevity, described in the context of a single embodiment, may also be provided separately or in any suitable sub-combination.

[0154] Although the invention has been described in conjunction with specific embodiments thereof, it is evident that many alternatives, modifications and variations will be apparent to those skilled in the art. Accordingly, it is intended to embrace all such alternatives, modifications and variations that fall within the spirit and broad scope of the appended claims. All publications, patents and patent applications and GenBank Accession numbers mentioned in this specification are herein incorporated in their entirety by reference into the specification, to the same extent as if each individual publication, patent or patent application or GenBank Accession number was specifically and individually indicated to be incorporated herein by reference. In addition, citation or identification of any reference in this application shall not be construed as an admission that such reference is available as prior art to the present invention.

1-23. (canceled)

24. A method for detecting a condition associated with hypoxia in a subject, the method comprising determining in a biological sample obtained from the subject the level of a cell free Ribonucleic acid (RNA) of at least one p53 inducible gene, wherein a level of the cell free RNA above or below a predetermined range associated with the at least one p53 inducible gene, is indicative that the subject has a condition associated with hypoxia.

25. The method of claim 24, wherein said predetermined range correlates with severity of the condition associated with hypoxia, and said level of the cell free RNA of at least one p53 inducible gene is compared with said predetermined range, the comparison allowing determination of the severity of the a condition associated with hypoxia in the subject.

26. A method for determining the effectiveness of a therapeutic treatment of a condition associated with hypoxia in a subject comprising determining the level of cell free RNA of at least one p53 inducible gene from two or more biological samples obtained from the subject at two or more time points, at least one of the time points is during or after the treatment, wherein:
(i) for a p53 inducible gene that is over-expressed in a condition associated with hypoxia a decrease in the level of the cell free RNA of the p53 inducible gene between the two or more samples being indicative of effectiveness of the therapeutic treatment;
(ii) for a p53 inducible gene that is repressed in a condition associated with hypoxia an increase in the level of the cell free RNA of the p53 inducible gene between the two or more samples being indicative of effectiveness of the therapeutic treatment.

27. A method for selecting a subject suffering from a condition associated with hypoxia, to receive therapeutic treatment to treat the condition, the method comprising determining the level of cell free RNA of at least one p53 inducible gene in a biological sample obtained from the subject and selecting the subject to receive said therapeutic treatment if the level of cell free RNA of at least one p53 inducible gene is above or below a predetermined range associated with the at least one p53 inducible gene.

28. The method of claim 24, wherein said sample is a bodily fluid sample.

29. The method of claim 26, wherein said sample is a bodily fluid sample.

30. The method of claim 27, wherein said sample is a bodily fluid sample.

31. The method of claim 28, wherein said bodily fluid sample is a blood sample.

32. The method of claim 31, wherein said blood sample is selected from the group consisting of a serum sample and a plasma sample.

33. The method of claim 29, wherein said bodily fluid sample is a blood sample.

34. The method of claim 33, wherein said blood sample is selected from the group consisting of a serum sample and a plasma sample.

35. The method of claim 30, wherein said bodily fluid sample is a blood sample.

36. The method of claim 35, wherein said blood sample is selected from the group consisting of a serum sample and a plasma sample.

37. The method of claim 24, wherein level of cell free RNA of at least one p53 inducible gene is determined by RT-PCR or by real-time quantitative RT-PCR.

38. The method of claim 26, wherein level of cell free RNA of at least one p53 inducible gene is determined by RT-PCR or by real-time quantitative RT-PCR.

39. The method of claim 27, wherein level of cell free RNA of at least one p53 inducible gene is determined by RT-PCR or by real-time quantitative RT-PCR.

40. The method of claim 24, wherein the condition associated with hypoxia is selected from cardiovascular diseases, cancer, cerebrovascular accident (CVA) and fetal stress.

41. The method of claim 26, wherein the condition associated with hypoxia is selected from cardiovascular diseases, cancer, cerebrovascular accident (CVA) and fetal stress.

42. The method of claim 27, wherein the condition associated with hypoxia is selected from cardiovascular diseases, cancer, cerebrovascular accident (CVA) and fetal stress.

43. The method claim 24, wherein the at least one p53 inducible gene is selected from p21 (GeneBank Accession No. Nm_{—}000389), BTG2 (GeneBank Accession No. Nm_{—}006763), HIF-1α (GeneBank Accession No. Nm_{—}001530), NOTCH1 (GeneBank Accession No. Nm_{—}017617), TGFβ3 (GeneBank Accession No. Nm_{—}003239) and ZMAT3 (GeneBank Accession No. Nm_{—}0022470).

44. The method claim 26, wherein the at least one p53 inducible gene is selected from p21 (GeneBank Accession No. Nm_{—}000389), BTG2 (GeneBank Accession No. Nm_{—}006763), HIF-1α (GeneBank Accession No. Nm_{—}001530), NOTCH1 (GeneBank Accession No. Nm_{—}017617), TGFβ3 (GeneBank Accession No. Nm_{—}003239) and ZMAT3 (GeneBank Accession No. Nm_{—}0022470).

45. The method claim 27, wherein the at least one p53 inducible gene is selected from p21 (GeneBank Accession No. Nm_{—}000389), BTG2 (GeneBank Accession No. Nm_{—}006763), HIF-1α (GeneBank Accession No. Nm_{—}001530), NOTCH1 (GeneBank Accession No. Nm_{—}017617), TGFβ3 (GeneBank Accession No. Nm_{—}003239) and ZMAT3 (GeneBank Accession No. Nm_{—}0022470).

The application's sequence listing, which the Patent Office published only in electronic form, follows.

SEQUENCE LISTING (34 sequences)

SEQ ID NO: 1 - protein, 21 aa, Artificial Sequence
  Forward primer  for Gene  P21
CTGGAGACTCTCAGGGTCGAA

SEQ ID NO: 2 - protein, 19 aa, Artificial Sequence
  Reverse primer for Gene  P21
CGGCGTTTGGAGTGGTAGA

SEQ ID NO: 3 - protein, 16 aa, Artificial Sequence
  MGB-probe for Gene P21
CAGACCAGCATGACAG

SEQ ID NO: 4 - protein, 19 aa, Artificial Sequence
  Forward primer for Gene MDM
GACTCCAAGCGCGAAAACC

SEQ ID NO: 5 - protein, 23 aa, Artificial Sequence
  Reverse primer for Gene MDM
ACATGTTGGTATTGCACATTTGC

SEQ ID NO: 6 - protein, 15 aa, Artificial Sequence
  MGB- probe for Gene MDM
CGGATGGTGAGGAGC

SEQ ID NO: 7 - protein, 21 aa, Artificial Sequence
  Forward primer for Gene VEGF
CTACCTCCACCATGCCAAGTG

SEQ ID NO: 8 - protein, 21 aa, Artificial Sequence
  Reverse primer for Gene VEGF
TGCGCTGATAGACATCCATGA

SEQ ID NO: 9 - protein, 14 aa, Artificial Sequence
  MGB-probe for Gene VEGF
AGGCTGCACCCATG

SEQ ID NO: 10 - protein, 23 aa, Artificial Sequence
  Forward primer for Gene HIF 1a
GCATCTTGATAAGGCCTCTGTGA

SEQ ID NO: 11 - protein, 23 aa, Artificial Sequence
  Reverse prime for Gene HIF 1a
CCATCCAAGGCTTTCAAATAAAA

SEQ ID NO: 12 - protein, 19 aa, Artificial Sequence
  MGB-probe for Gene HIF 1a
AGCTATTTGCGTGTGAGGA

SEQ ID NO: 13 - protein, 21 aa, Artificial Sequence
  Forward prime for Gene TP5313
GCAACGCTGAAATTCACCAAA

SEQ ID NO: 14 - protein, 23 aa, Artificial Sequence
  Reverse prime for Gene TP5313
TAGGATCCGCCTATGCAGTCTAG

SEQ ID NO: 15 - protein, 18 aa, Artificial Sequence
  MGB-probe for Gene TP5313
TGCTGGAGTTAATCTTAT

SEQ ID NO: 16 - DNA, 19144 bp, Homo sapiens
gattggggttttcccctcccatgtgctcaagactggcgctaaaagttttgagcttctcaaaagtctagagccaccgtccagggagcaggtagctgctgggctccggggacactttgcgttcgggctgggagcgtgctttccacgacggtgacacgcttccctggattgggtaagctcctgactgaacttgatgagtcctctctgagtcacgggctctcggctccgtgtattttcagctcgggaaaatcgctggggctgggggtggggcagtggggacttagcgagtttgggggtgagtgggatggaagcttggctagagggatcatcataggagttgcattgttgggagacctgggtgtagatgatggggatgttaggaccatccgaactcaaagttgaacgcctaggcagaggagtggagctttggggaaccttgagccggcctaaagcgtacttctttgcacatccacccggtgctgggcgtagggaatccctgaaataaaagatgcacaaagcattgaggtctgagacttttggatctcgaaacattgagaactcatagctgtatattttagagcccatggcatcctagtgaaaactggggctccattccgaaatgatcatttgggggtgatccggggagcccaagctgctaaggtcccacaacttccggacctttgtccttcctggagcgatctttccaggcagcccccggctccgctagatggagaaaatccaattgaaggctgtcagtcgtggaagtgagaagtgctaaaccaggggtttgcccgccaggccgaggaggaccgtcgcaatctgagaggcccggcagccctgttattgtttggctccacatttacatttctgcctcttgcagcagcatttccggtttctttttgccggagcagctcactattcacccgatgagaggggaggagagagagagaaaatgtcctttaggccggttcctcttacttggcagagggaggctgctattctccgcctgcatttctttttctggattacttagttatggcctttgcaaaggcaggggtatttgttttgatgcaaacctcaatccctccccttctttgaatggtgtgccccaccccgcgggtcgcctgcaacctaggcggacgctaccatggcgtgagacagggagggaaagaagtgtgcagaaggcaagcccggaggtattttcaagaatgagtatatctcatcttcccggaggaaaaaaaaaaagaatgggtacgtctgagaatcaaattttgaaagagtgcaatgatgggtcgtttgataatttgtcggaaaaacaatctacctgttatctagctttgggctaggccattccagttccagacgcaggctgaacgtcgtgaagcggaaggggcgggcccgcaggcgtccgtgtggtcctccgtgcagccctccggcccgagccggttcttcctggtaggaggcggaactcgaattcatttctcccgctgccccatctcttagctcgcggttgtttcattccgcagtttcttcccatgcacctgccgcgtaccggccactttgtgccgtacttacgtcatctttttcctaaatcgaggtggcatttacacacagcgccagtgcacacagcaagtgcacaggaagatgagttttggcccctaaccgctccgtgatgcctaccaagtcacagacccttttcatcgtcccagaaacgtttcatcacgtctcttcccagtcgattcccgaccccacctttattttgatctccataaccattttgcctgttggagaacttcatatagaatggaatcaggctgggcgctgtggctcacgcctgcactttgggaggccgaggcgggcggattacttgaggataggagttccagaccagcgtggccaacgtggtgaatccccgtctctactaaaaaatacaaaaattagctgggcgtggtgggtgcctgtaatcccagctattcgggagggtgaggcaggagaatcgcttgaacccgggaggcagaggttgcagtgagccaagatcgtgccactacactccagcctgggcgacaagaacgaaactccgtctcaaaaaaaaggggggaatcatacattatgtgctcatttttgtcgggcttctgtccttcaatgtactgtctgacattcgttcatgttgtatatatcagtattttgctccttttcatttagtatagtccatcgattgtatatccgtccttttgatggccttttgagttgtttcccatttgcggttatgaaataaagctgctataaacattcttgtacaattctttttgtgatcatatgttttcgtgtttcttggagaaatacttaggaggggaattgcgagtttggaagtaaaaagtagctgtattttgaactttttcagaagctctgagttttccagagcggttgtaccattttacactccaactagcaaggtatgggagttattatggttgtgccacagccttccggacattaggtattgtcagtctttctaatgtggtatatccttgtggttgtaatttacagttctctattgactaaggatgttcagcattttttcatgtgcctattggccattcgtattttgtttgtaaagtagctcttcgagtcttttacctgttattttggttttttgtttgtttttattgttcagttgtgggactgctttatacattctggatacaagtcctttatcagatccatgtgtcgtgaatgttttcttctgatctgttgcttgcctatttgtttgctttacagagtttacagtatcttaagaggagtggatttatcttttttatgttcagtatttgccttgtcctgtttaggacatctttttttttttttttaaccccagggtcatgaagatattatcttacattttcttttaggacctttatggttgtaagttttacagtaaggtccttgagccattaattaattcttaaaattaattgtttatggtgtgaggtgtaggagtcagtctctggtatctttcctgtatggaaatccagttattctgtctccacttgttgaaataggcttcctttctctactgaatgcttttaattttaattattttacagttggagtatagggctaccattttagtgctattttctttttttctttgttaatttttgagacagggactcacactgttgcccaggctagagtacaatggcacaatcaaggcttactgcagcctcgaacccctgggctcaagcagtcctctagcagcctcacgagtagctgggattactccaccacacccagctaactattttatttttttgtattgacaggatctcactatgttgcccaggctggtctcaaactgctggcctcaagctttcatcccatctcggcctcccaaagtgctgggattacaggtgtgagccaccatgcctgacctcttagtgctattttctatttatctcctctgttctctgctctctttaaacgttggaggaagaaacagtacccatcttacacaaactcttcagaaaacagaggaacagactgggcgcggtggctcatacctgtaatctcagcactttggtacgctgaggcaggggatcatttgaggtcgggagttcgagaccagcctggccaacacggcgaaaccccatctctactaaaaatacaaaaagtagctaggcgtggtgacacatacctgtaatgccagttactcaggaggctgaggcacaagaatcccttgaacctgggaagcggaggttgcagtgagccgagattgcgccactgcactccagcctgggcaacagagtgagaccctgtctcagaaaaaaaaagaaagaaagaaaaaatagaggaatatttcccaacttgttttcgaagccagcataatcctggtaccaaaaccaaacaaggacattataagaaaagaaaatatagaccaatattcctgttagcatagacatgcaacagctaaccaattttagcaaaccaaacctggtaatatagaaaaaaggataaataggccagtcgcggtggctcacgcctgtaatcccagcactttgggaggctgaggcaggcagatcacttgaggtcaggagtttgagaccagcctgaccaacatggtgaaaccccgtttctaataaaaatacaaaaatcaggctgggcacggtggctcacgcctgtaatcccagcactttgggaggccgaggtgggcagatcacgaggtcaggagttcaagaccagcctgaccaatgtggtgaaacgccatctctactaaaaatacaaaaatcagccggtgtggtggcacctgcctgtaatcccagctactcaggaggctgaggcagaattgcttgaacccgggaggcagaggttgcagtgagccaagatcgtgccactgcactccagcctgggcgacagagcaagacttcatctcaaaaaaaaaaaaaaattagctgggcatggtggtgggcacctgaaatcccagctactcgggagtctgaggcaggagaatcgcttgaacccaggaggcagaagttgcactgagctgggatcacaccattgcactccagcctgggcaacagagtgagactccatctcaaaaaaagaaaaagaaaaaggataaatacattctaaccaaataatgtttatctcatgattgtagctgattcaacattcaaaaattggcctggtgcagtagctcaggcctgtaatcccaacattttaggaggctgaggcaggaagatctcttgagcccaggatttcaagaccagcctgggcaacatagtcagactggtctttactggggggaaaaaaatcagtctgtgtaattcaccacattaacaaagggaaacataaaaaccctatgatcatttcaacagatgtagcaaaagcagttaatgatattcaacacatatgcatgattacaaaccaaccaacctcctagcaaactagggaaaggaaacttaacctagtttgataacagggcgtccacagtcggagttccactagcagcatacataatggtagaaaactcagtgctgccgggcgcggtggctcacgcctgtaatgccagcactttgggaggcctaggcgggcggatcacgaggtcaggagatcgagactgtcctgactagcatgctgaaaccccgtctctactaaaaatacaaaaacaaaaaattagccgggcatggtggcgggcgcctatagtcccagctactcgggaggctgaggcgagagaatggcgtgaacccgggaggcggagcttgcagagcctagatcgtgccactgcactccagcctgggtgacagagtgagacttcgtctcaaaaaaaaaaaaaaaaaaaaaagaaaagaaaactcaacgctttttcctctaagatcaggaactagaaaaggatttgactctcacaacgttgataccatactggaggttttaaccaggcaagaaaaagaaataatgagggccgggtgcggtggctcaggcctgtaatcccagcactttgggaagccgagacgggtggatcacgaggtcaggagatcgagaccatcctggctaacacggtgaaaccctgtctctactaaatatacaaaaaattagccgggcgtagtggcgggcgcctgtagtcccagctactcgggaggctgaggcaggagaatggcgtgaactcagggggcggagcttgcagtgagctgagatcgagccactgcactccagcctgggcgacagagcaagactgtgtctcaaaaaaaaaaaaagaaaaagaaataatgattagtggcccgatgtctcacgcctataatcccagcactttgggaggccgaggtgggcagatcacctgaggtctggagttggagaccagcctgacaaagatggtgaaacctcgtctctattaaaatattaaaaaaatagccaggcgttggccgggtacagtggctcatgcctgtaatcccagcactttgggaggccgaggtgggtggatcacctgaggtcaggagttcaacaccagcctggccaacatggtgaaaccccatctctactaaaaatacaaaaattagccgggcgtagtggcgggcgcctgtaatcccagctacttgggaggcttaggcaggagaatcgcttgaacctgggaggcggaggttgtagtgagccgagattgcaccattgcactccagcctgggtgacaaaagcaaaaactccgtctcaaaaaaaaaagaattagccaggggtagtggtgaacgcctgtagtcccagctactcaggaggcagaggcaggagaatcacttgaacccaggaggcagaggttgcagtgagccgagattgtcccattgcactccagcctaggcgacaagagcaaaattccatgtcaaaaaaaaaaaaaaaaaaggaaagaaaaaaaataacgattagaaaggaagaaataaaacacattcacagccagtatgattctatacatacatgtcctaatggggccaggcgtggtggctcatgcctgtaatcctagcacttttaggaggctgaggcaggtggcttccctgggaccagcctggccaacatggtgaaaccccaactctaataaaaatacaaaaaatcagccaggcgtggtgacgggcacctctaatcccagctactcaggaggctgaggcaggagaattgcttggacctgggaggcagaggttgcagtgagccgagatcgcgctattgcactccagcctgggcaacaagagtgaaactccggcagggtgtggtggcttacgcctgtaatcccagcacttcgggaggctgaggcaggccgatcacctgaggtcaggagtttgagaccaacctaacatggtgaaaccccgtctctactaaaaatacaagaattagctgggtgtagtggtgggcgcctgtaatcccagctacttgggaggctgagacagaagaattgcttgaacccaggaggtggaggttgcagtgagctgagatcatgccattgcacaccacgccgggcaacagagcgagattccgtctcaaaaaaaaaaaaaaagagtgaaactctatctcaaaaaaaaaaaaaagtcctaatggaaaatccataaaaagctaccaaaactaataaataaatatagcagggttgcaggttacagggcaatatagttatccctctatctgtaggggcttggttctgggactcctcacacaccaaacccacagatgtctaagtcccatatataagacggtatagtatttggatttaacctacacatatcctcccatatagtttaaattatctctagattacttacattacccccatacaatgaaaatgctaatgtacatgcaagtatgtatgtaagtacttgtactatattgtttagggaatcactggacatataggccttcaagactgataccagcagccactgttaagattctggtcaggcctgcccctgtttggggtctcagttgatctcattgccttcccacccagccaagggcacctgcatttctcttggctccctggccatttggaaggcctagttcagcctggcacatttgtatcctggcccactgatgctggtacccctgggaaggtcctgctctgaaaaacacggagattttagttgctactgaagatttgagagataaagacagggagacctgtctgtagacctgtgtccctccaagtgggattgagactttgggccccccatttcaggacagcacctcctggcctgttgactgaatagatccctgaaggaggtgtacttgcattaatggagtgggggtgggagcagtaccacagatccgcactaacaatcacacagttctctctagaataataatatagaacaagtgaaatagaacaattgcagaaagagctaacctttgttgagctcttactgtgtgcccagcactttcctcaactctacatttcccataatacacagagtactaggtaggccaggcttggtggctcacgcctgtaatcccagcactttaggaggccaaggggggtggatcacctgaggtcgggagttcaagaccagcctgaccaacatggtgaaaccccgtctctactagaagtacaaaattagccaggtgtggtggcacatgcttgtagtcctagctactcagcaggctgaggcaggagaatcatttgaatccgggaggaggttgcagtaagcggagatagtgccactgtactccagcctgggcaataagagctgagactccgtctcaaaataaaataaaataaaataaaataaaataaaataaaataaaaaaagaaaagagcctgccattaaaggagctgtttggtaggggatgttttgtcagtgcaaacaacagaaaagtgggctgggcacagtggttcatgcctgtaatcccagcactttgggaggccaaggcgggcggatcacctgaagttgggagttcaagaccagcctgaccaatatggagaaaccccgtctctactaaaaatacaaaattagccgggcgcagtggcgcatgcctgtaatcccagctactcgggaggctgaggcaggagaatcgcttgaacctgggaggcagaggttgcggtgagccgagatcgcaccattgcactccagcctggacgagagcaaaactctgtctcaaaaaaaaaaaaaaacagaaaagtgtaacaaacacttacagtaggcatgtttcttagcaaatctgatgacaaatttggcataaagaaagagagcatccctgaaaaaaaaaaaaagaaaaagaaagagagcatcctgcctgggcaacatagtgaaaccctgcctctacaaaaaaactcaaaaattggccgggtgcagtggctcacacctgtaatcccagcactttgggagtcggaggcgggaggatcacctgaggtcaggagttcgaaaccagcctggccaacatggcaaaaccccatctctactaaaaatacaaaaaattaatcaggcgcattggtgggcgcctgtaatcccagctactcaggaagttgaggcaagaggatcgcttgaatctgggaggtggaggttacagtgagtcgagatcacaccactgcactctagcctgggtgacagggcgagactccgtctccaaaaaaaaaaagaaaaagaaaaagactaaaaaattagccaggcaggcctctgtggtcccagctacttgggaggctgaggcaggagaatcactgagcccaggagtccgaggctgtagtgagccatgattgcaccactgtaccctagcttgggcaacaaagcaagaccctgcctcaaaagaaaaaagaaagaaagaaagaacatggcgggccaggcacagtggctcacacctgtaatcccagcgctttgagaggccgaggcaggtggatcacaaggtcaggagttccacaccagcctggccaacatggtgaaaccctgtctctactaaaaatacaaaaaatcagccaggcatggtggcaggggcctgtaatcccagctactcgggaggctgaggcaggagaattgcttgaaaccagaaggcagaggttgcagtgagcctagactgcaccactgcactccagcctgggcgaaaagagccaaactccatctcaaaaaacaaacaaaaaaacaaaacaaaagaaaacatggcaaagcctttgaaagcttgtctgggagaaggtgcgatgatagttgcataacttcgtgcaagatgctggtccacacaggggctgccccttgctctttctcgctctcttaacctctcatataacaggcttgtgtgttattcacatttattgagcccaagcaggtgcaaggcattgtgatctaatactttggtcagcaagacaacaagatagatcactgccctgcccttaggaagtgtatatgctattagaggaaacagataaaataaacaaggaaaagtatcagacaatgtaagtgctatgagaatgcaaatgaggtgatgtgaattaaaataggatgacttaaagtctgcacgggaaggagcctacccccatgttcctggctagccaaggaaccaccagttgattagcagagaagggcagccagtctagctagagcttttggggaagagggagtggttgttaagagatgagattaaagaagccgagacgggccattcgtgaggggtttgtaatgcagggctgaggagtgtccgaagagaatgggcaggtgagcggtgagacagttgttcttccagaagctttgcagtgaaaggaatcaaagaaatggagccgtgtatcaggtggggaagggtgggggccaagggggtgtccttccccatacagagattgcaggctgagaatgactatatccttgttaacaggaggtgggagcagggcacggtagctcacacctgtaatcttggcactttaggaggctgaggcgggccgatcacctgaagtaaggagttcgagaccagcctggccaacatgcaaagccctgtctctactaaaaatacaaaaattagctgggtgtggtggtactcgcctgtaatcccagctactcgggagactgaggcaggagaatggcttgaacccggaaggtagaggttgcagtgagctgagatcatgccactgtgctccagcctaggtgacagagagagactccatctcaaaaaaaaaaaaaaaatacaggaagggagttgggaatagggtgcacatttaggaagtcttggggatttagtggtgggaaggttggaagtccctctctgattgtcttttcctcaaagaagtgcatggctggtgaggggtggggcaggagtgcttgggttgtggtgaaacattggaagagagaatgtgaagcagccattcttttcctgctccacaggaagccgagctgtctcagacactggcatggtgttgggggagggggttccttctctgcaggcccaggtgacccagggttggaagtgtctcatgctggatccccacttttcctcttgcagcagccagactgccttccgggtcactgccatggaggagccgcagtcagatcctagcgtcgagccccctctgagtcaggaaacattttcagacctatggaaactgtgagtggatccattggaagggcaggcccaccacccccaccccaaccccagccccctagcagagacctgtgggaagcgaaaattccatgggactgactttctgctcttgtctttcagacttcctgaaaacaacgttctggtaaggacaagggttgggctggggacctggagggctggggacctggagggctggggggctggggggctgaggacctggtcctctgactgctcttttcacccatctacagtcccccttgccgtcccaagcaatggatgatttgatgctgtccccggacgatattgaacaatggttcactgaagacccaggtccagatgaagctcccagaatgccagaggctgctccccccgtggcccctgcaccagcagctcctacaccggcggcccctgcaccagccccctcctggcccctgtcatcttctgtcccttcccagaaaacctaccagggcagctacggtttccgtctgggcttcttgcattctgggacagccaagtctgtgacttgcacggtcagttgccctgaggggctggcttccatgagacttcaatgcctggccgtatccccctgcatttcttttgtttggaactttgggattcctcttcaccctttggcttcctgtcagtgtttttttatagtttacccacttaatgtgtgatctctgactcctgtcccaaagttgaatattccccccttgaatttgggcttttatccatcccatcacaccctcagcatctctcctggggatgcagaacttttctttttcttcatccacgtgtattccttggcttttgaaaataagctcctgaccaggcttggtggctcacacctgcaatcccagcactctcaaagaggccaaggcaggcagatcacctgagcccaggagttcaagaccagcctgggtaacatgatgaaacctcgtctctacaaaaaaatacaaaaaattagccaggcatggtggtgcacacctatagtcccagccacttaggaggctgaggtgggaagatcacttgaggccaggagatggaggctgcagtgagctgtgatcacaccactgtgctccagcctgagtgacagagcaagaccctatctcaaaaaaaaaaaaaaaaaagaaaagctcctgaggtgtagacgccaactctctctagctcgctagtgggttgcaggaggtgcttacgcatgtttgtttctttgctgccgtcttccagttgctttatctgttcacttgtgccctgactttcaactctgtctccttcctcttcctacagtactcccctgccctcaacaagatgttttgccaactggccaagacctgccctgtgcagctgtgggttgattccacacccccgcccggcacccgcgtccgcgccatggccatctacaagcagtcacagcacatgacggaggttgtgaggcgctgcccccaccatgagcgctgctcagatagcgatggtgagcagctggggctggagagacgacagggctggttgcccagggtccccaggcctctgattcctcactgattgctcttaggtctggcccctcctcagcatcttatccgagtggaaggaaatttgcgtgtggagtatttggatgacagaaacacttttcgacatagtgtggtggtgccctatgagccgcctgaggtctggtttgcaactggggtctctgggaggaggggttaagggtggttgtcagtggccctccaggtgagcagtaggggggctttctcctgctgcttatttgacctccctataaccccatgagatgtgcaaagtaaatgggtttaactattgcacagttgaaaaaactgaagcttacagaggctaagggcctcccctgcttggctgggcgcagtggctcatgcctgtaatcccagcactttgggaggccaaggcaggcggatcacgaggttgggagatcgagaccatcctggctaacggtgaaaccccgtctctactgaaaaatacaaaaaaaaattagccgggcgtggtgctgggcacctgtagtcccagctactcgggaggctgaggaaggagaatggcgtgaacctgggcggtggagcttgcagtgagctgagatcacgccactgcactccagcctgggcgacagagcgagattccatctcaaaaaaaaaaaaaaaaggcctcccctgcttgccacaggtctccccaaggcgcactggcctcatcttgggcctgtgttatctcctaggttggctctgactgtaccaccatccactacaactacatgtgtaacagttcctgcatgggcggcatgaaccggaggcccatcctcaccatcatcacactggaagactccaggtcaggagccacttgccaccctgcacactggcctgctgtgccccagcctctgcttgcctctgacccctgggcccacctcttaccgatttcttccatactactacccatccacctctcatcacatccccggcggggaatctccttactgctcccactcagttttcttttctctggctttgggacctcttaacctgtggcttctcctccacctacctggagctggagcttaggctccagaaaggacaagggtggttgggagtagatggagcctggttttttaaatgggacaggtaggacctgatttccttactgcctcttgcttctcttttcctatcctgagtagtggtaatctactgggacggaacagctttgaggtgcgtgtttgtgcctgtcctgggagagaccggcgcacagaggaagagaatctccgcaagaaaggggagcctcaccacgagctgcccccagggagcactaagcgaggtaagcaagcaggacaagaagcggtggaggagaccaagggtgcagttatgcctcagattcacttttatcacctttccttgcctctttcctagcactgcccaacaacaccagctcctctccccagccaaagaagaaaccactggatggagaatatttcacccttcaggtactaagtcttgggacctcttatcaagtggaaagtttccagtctaacactcaaaatgccgttttcttcttgactgttttacctgcaattggggcatttgccatcagggggcagtgatgcctcaaagacaatggctcctggttgtagctaactaacttcagaacaccaacttataccataatatatattttaaaggaccagaccagctttcaaaaagaaaattgttaaagagagcatgaaaatggttctatgactttgcctgatacagatgctacttgacttacgatggtgttacttcctgataaactcgtcgtaagttgaaaatattgtaagttgaaaatggatttaatacacctaatctaaggaacatcatagcttagcctagcctgctttttttttttttttttttggagacagagtctcactctgtcacccaggctggagtgcagtggcgggatctcggctcactgcaacctccgccttctgggttcaagcgattctcctgcctcagcccactgagtagctgggattacaggcacctgccccgacgcccagctaattttttgttatttatttatttttttttttagtagagatgaggtttcaccatgttggccaggctagtctcgaactcctgaccttgtgatctgcctgccttggcctcccaaagtgctgggattacaggcgtgagccaccgcacccggcctgcctagcctacttttattttatttttaatggagacagcatcttgctctgttgcccaggctggattacagtgatgtgatcatagctcattataccctcctgggctcaagcaatccccctaactctgcctccccagtagctaggaccacaggcatacaccaccatacccagctaatttttaaaattttttgtagatagatagagtctcactatgttgcccaggctggtctctagcctacttttttgagacaaggtcttgctctgtcacccaggctggatagagtgcagtagtgcagtcacagctcactgcagcctccacctcccaggctccatccatcctcccagctcagcctcccaagttgcttcaactacaggcctgcaccaccatgcctggctaatttttatttatttatttttattttattttattttatttttttgagactcagtctcactctgtcgcccaggctggagtgcagtggcatgatctcggctcactgcaacctctgcctcctgggttcaagtgattctcctgcctcagcctcccgaatagctaggactacaagcgcctgctaccacgcccagctaatttttgtatttttagtagagacagggtttcaccatgttggccaggctggtctcgaacttctgaccatgtgatccgcccgcctcggcctcccaaagtgctgggattacaggtgtgagccaccacgcccggctaatttttatttatttatttaaagacagagtctcactctgtcactcaggctagagtgcagtggcaccatctcagctcactgcagccttgacctccctgggctccggtgatttcaccctcccaagtagctaggactacaggcacatgccacgacacccagctaattttttattttctgtgaagtcaaggtcttgctacgttgcccatgctggtatcaaacccctgggctcaatcaatccttccacctcagcctccccaagtattggggttacaggcatgagctaccacactcagccctagcctacttgaaacgtgttcagagcatttaagttaccctacagttgggcaaagtcatctaacacaaagccctttttatagtaataaaatgttgtatatctcatgtgatttattgaatattgttactgaaagtgagaaacagcatggttgcatgaaaggaggcacagtcgagccaggcacagcctgggcgcagagcgagactcaaaaaaagaaaaggccaggcgcactggctcacgcctgtaatcccagcatttcgggaggctgaggcgggtggatcacctgaggtcaggagttcaagaccagcctagccaacatggtgaaaccccgtctctactaaaatacaaaaattaaccgggcgtgatggcaggtgcctgtaatcccagctacttgggaggctgaggcaggagaatcgcttgaaccaggaggcggaggttgcagggagccaagatggcgccactgcactccagcctgggcgatagagtgagactccgtctcagaaaaaaaagaaaagaaacgaggcacagtcgcatgcacatgtagtcccagttacttgagaggctaaggcaggaggatctcttgagcccaagagtttgagtccagcctgaacaacatagcaagacatcatctctaaaatttaaaaaagggccgggcacagtggctcacacctgtaatcccagcactttgggaggtggaggtgggtagatcacctgacgtcaggagttggaaaccagcctggctaacatggtgaagccccatctctactaaaaacacaaaaattagccaggtgtggtagcacacgcctgtagtcccagctactcgggaggctgaggcacaagaatcacttgaaccccagaggcggagattgcaatcagccaagattgcaccattgcactcccgcctgggcaacagagtgagaccccatctcaaaataaataaataaatatttttaaaagtcagctgtataggtacttgaagtgcagtttctactaaatgcatgttgcttttgtaccgtcataaagtcaaacaattgtaacttgaaccatcttttaactcaggtactgtgtatatacttacttctccccctcctctgttgctgcagatccgtgggcgtgagcgcttcgagatgttccgagagctgaatgaggccttggaactcaaggatgcccaggctgggaaggagccaggggggagcagggctcactccaggtgagtgacctcagccccttcctggccctactcccctgccttcctaggttggaaagccataggattccattctcatcctgccttcatggtcaaaggcagctgaccccatctcattgggtcccagccctgcacagacatttttttagtcttcctccggttgaatcctataaccacattcttgcctcagtgtatccacagaacatccaaacccagggacgagtgtggatacttctttgccattctccgcaactcccagcccagagctggagggtctcaaggaggggcctaataattgtgtaatactgaatacagccagagtttcaggtcatatactcagccctgccatgcaccggcaggtcctaggtgacccccgtcaaactcagtttccttatatataaaatggggtaagggggccgggcgcagtggctcacgaatcccacactctgggaggccaaggcgagtggatcacctgaggtcgggagtttgagcccagcctgaccaacatggagaaaccccatctctactaaaaatacaaaagtagccgggcgtggtgatgcatgcctgtaatcccagctacctactcgggaggctgaggcaggagaatcgcttgaacccgggaggcagaggttgcggtgagctgagatctcaccattacactccagcctgggcaacaagagtgaaactccgtctcaaaaaagataaataaagtaaaatggggtaagggaagattacgagactaatacacactaatactctgaggtgctcagtaaacatatttgcatggggtgtggccaccatcttgatttgaattcccgttgtcccagccttaggcccttcaaagcattggtcagggaaaaggggcacagaccctctcactcatgtgatgtcatctctcctccctgcttctgtctcctacagccacctgaagtccaaaaagggtcagtctacctcccgccataaaaaactcatgttcaagacagaagggcctgactcagactgacattctccacttcttgttccccactgacagcctcccacccccatctctccctcccctgccattttgggttttgggtctttgaacccttgcttgcaataggtgtgcgtcagaagcacccaggacttccatttgctttgtcccggggctccactgaacaagttggcctgcactggtgttttgttgtggggaggaggatggggagtaggacataccagcttagattttaaggtttttactgtgagggatgtttgggagatgtaagaaatgttcttgcagttaagggttagtttacaatcagccacattctaggtaggggcccacttcaccgtactaaccagggaagctgtccctcactgttgaattttctctaacttcaaggcccatatctgtgaaatgctggcatttgcacctacctcacagagtgcattgtgagggttaatgaaataatgtacatctggccttgaaaccaccttttattacatggggtctagaacttgacccccttgagggtgcttgttccctctccctgttggtcggtgggttggtagtttctacagttgggcagctggttaggtagagggagttgtcaagtctctgctggcccagccaaaccctgtctgacaacctcttggtgaaccttagtacctaaaaggaaatctcaccccatcccacaccctggaggatttcatctcttgtatatgatgatctggatccaccaagacttgttttatgctcagggtcaatttcttttttcttttttttttttttttttctttttctttgagactgggtctcgctttgttgcccaggctggagtggagtggcgtgatcttggcttactgcagcctttgcctccccggctcgagcagtcctgcctcagcctccggagtagctgggaccacaggttcatgccaccatggccagccaacttttgcatgttttgtagagatggggtctcacagtgttgcccaggctggtctcaaactcctgggctcaggcgatccacctgtctcagcctcccagagtgctgggattacaattgtgagccaccacgtccagctggaagggtcaacatcttttacattctgcaagcacatctgcattttcaccccacccttcccctccttctccctttttatatcccatttttatatcgatctcttattttacaataaaactttgctgccacctgtgtgtctgaggggtg

SEQ ID NO: 17 - DNA, 8662 bp, Homo sapiens
gttgtatatcagggccgcgctgagctgcgccagctgaggtgtgagcagctgccgaagtcagttccttgtggagccggagctgggcgcggattcgccgaggcaccgaggcactcagaggaggtgagagagcggcggcagacaacaggggaccccgggccggcggcccagagccgagccaagcgtgcccgcgtgtgtccctgcgtgtccgcgaggatgcgtgttcgcgggtgtgtgctgcgttcacaggtgtttctgcggcaggtgaatgacgggcgtgggtcggtgcgcgctcggcttgcgcacacggtgtctctaagtgcgcgggtgacgagagtcgggatgtgccggagaccccggggcggagagcgggattacaagtacaggaatccctggtcacgctccccgcccctggaaacccagctggggcgagggagggcgtggacgggaccgttctgggagctcgcctttggctgcggttggctccaggccccaggcgcagtttgctcgcggcgtggggatgaagtccgtgtccctggaggggcccaggaagggcgaggaaagcggagtggagtaagttcgtctaggatcggtcccgggtggctctgggatccaatctgcgccgccctggcccaggtcccaggttcaggtcctttacgccactgtgtccaccacctggctgagcgctgaggtcagcgcgggctgtttcctggcccttgggaatgtgccaggacccgtcccctaaggactagcgaggaggtgactcactgtgacaaggagaccccagggaacggactgtatgaggtcagaaccccgcccgggatggggtacagcgggactccagaagccctctcccctgccccttcgcggtctccgtcctcccatcggcacagtgacctatttggctggaacagtttgttcccaaggaagccgggcactggaggtccgggacaccgcgtcgggtccccgctccgcggcgcgctgtaggggtcggggagtcacggccctgctctgggcgggctctaaccagcctgtcagtcggggaagggcaagggtctcctctacctctttcccaccgcggccgggagaatcgcggcccagcctgtcctcgggtcggggcgctggactccggggcgggagcggagcccacgcctggatgggaggcggggagggttcatgtctttgaggggtggggggtctggggggcacgacgctgctcagggcctctatcagctgcctcgggggctcagggcttcccgacctagcccagattccctctccgaaagctacagggctgagcggagcaggggggcgagtcgccccctggggcgccgccgcctggcgcggaccacagcgcgtcctctccgtcccaaacccctgggggacacttgcgccctcttcgtgaggaaaagcatcttggagctgggttaggaacttggggcgcccaggcagcttcccctctccttgcctccctccacgtcgcgtttctgggaggacttgcgagcggttttgttttcgttgctcccgtctatttttattttccagggatctgactcatcccgtgctttgggcgtggagataaggtggaggggccggctcccggcgcgcgcgcgcgtgcgtgtctgcgcgggcgtgtgtgtgtgtgtgtgtgtgtgtgtgtgtgtgtgtgtctgtgtcagagacggcacaagagcgcgcggtttcccaacagcggcgggagtttcggaagcctggccggctcagcgtgacgtgttcgcggccccccggtcccctcccattctccccctccccaccccagggtgacgcgcagccggagtggaagcagttttggcgggcgagcagcgccttgcaggaaactgactcatcactactccctccagcggtccgaggctctgcccacgcacctcccactccgcgcgtgatttcctggaggccggcgccccctcccggccctggcgggaatagcacacaggctttcccgcggagtggggctggccggcgcgaaccgccgcggctactcctgggctcatccgagatcaacccctatgccattaccaccccttcaaaggagcactccttaggttcaacagtattcactgagctcttactggaaattaaaatatggctgaagtctaaggcaggaaggccaataaaggaggctatttttaattgtttctaaaacaagggtttgcgtttctgagttttctttgggctgaaagttattatgagcatgagagcagattttgatgggggaggagaggcctatgagagccataagagaaggaggggtggtagaagaggagagggtgcctgcctagatcctagtcctgtcttgaactcccgagagccagggaatatccagcaccttgatgaagccctaggcgggcgcctcctccttgtgcctatgatgtattgagacccagaatgtccatttcaaacataccagtgtgtctccgcttggctggcaacccaagagtgcccatctgaggaattgtgccaaacacttgcttgaatcttcaatctggattaagttggtctcgggaggcagggcctcagcaatctatattttgaaaaaactccctaggtgcttttctttctttctttttttctttctttctttctttctttctttctttctttctttctttctttctttctttttctttctttctttctttttctttcttttctttctttctttctttctttctttctttctttctttctttcttcctttctctttctctctttctttctctttctctctttctttcttttctttcgacagagttgcactctgtcacccaggctggagtgcaatggcaccatcctggactcaagtagtcctcctgtttcagcctcccaagtaaccgggaccacaggcgtgatccccccgcccccatgcccagatttttttttttttttttttttttttgagatgcggtctcgctctgtcacccaggctggagtgcagtggcgtgatctcggctcactgcaagctccgcctcccgggttcacgccattctcctgcctcagcctcccgagtagctgggactacaggtgctgccatcatgcccggctaatttttttttgtatttttagtagagacggggtttcaccgtgttagccaggatggtctcaatctcctgacctcgtgctccgccctcctcggcctcccaaagtgctgggattacaggtgtgagacactgcacccaaccacccagctaatttttatttatttttatttttagtagagacagggtctcagctagttgcccaggctagtcttggacccttgggctcaaatgattctcccacctctgcctcccagagtattaggattacaggcataagccactgcccctggcctccccaagtgattgtgatgggcctctctggttaagaaacctcaaaattagagagggagtggggttcaatactacagcacaggactcagggcaaacaggcctgggttcagatcctggctgtgccacttatgaactgtgtgatgttaggcaagttacttaacttatctgagccttggttgcctcttctgtaaaaagggagctaatagatatccactttttaggaggattgatatttttaaactgcttagaacagcccccaaacataaaaatatataaataaatcccaactcatgcctagcagagggtggatagaggttatttgagggctctgtccactgtactgggtgacccctttatggggcagtggcctttggcctttttagctgtatgactcaggggcaagtctcatatctcttccatctcctgccctttaaacttggtgtgaagttaccaagagcctcctctcccaaccagctgggacgtgaaactgtgggctccactgatcacaagcagtggggtgaggtggggtggagcagatgtggcatgtgtcccgggcttcctgcctcatgaggactcagcagagctttcacccccagaaactgcaagttgggacttgtccctaggaaaatccagttgctgccaaggtcgtgcagtcactcagccctggagtcaagccagagcaggcaggtaggtgccagggctccctcatgggcaaactcactctccgttttccctctcctgaagggggaggagaggagccaggtagaccagccacctttaattttctttttgcctgcaaaacggtttccttggacacaggcaacacgaggcaggggctgccaggtgtctagacttcagatcacctgatgtgcctggcaggatgtggctcagcctgggagaaatcatcccttgcgctgccccgcccggcccctccttacccctaggccacccgcctgacgacatccttgggaaaggccctcagcctacagcacctgtcagctgctgtctgaaggaggtagttggcagggggaagtgataggggggaggctcagtaaaactgaaggcagagaggaataatcatacttctgttttcaatgcacttctctatacgaagtgctgctggcacgttacctacattaactcagttaattctcatgtctatcctctgagacagtcactattactatccccattttatagatgaggaaactagagctcagacaagttaagttgcttgcccagggtcacctagtaaaacctggactccagcccaggtgatctggctccagagccctcctgcttaaccaccaggatacagcctttcattcagctctgttctgtctgccttgctgcatggactctgtgatcaatttcttgagtatgtgtctgtagccatgctctttaaacttgtacatggccccatttatggatgaggaaactgagacctagagacattaagtggctttttaaagcttacgtagtaactggcagagctaggaccacaacccgggtgctttttgccccaaagtcccgggtacttttacttggcagagcagggttaccctacttggggatctgggtcgggggacttaggaggctggaggaactgtcagactgtttcttcttttgggaattgaccttctggccagggctgcgattaggaaactgctggactctggcaattcacacatatttggggggcattcacacccatgagggacacctctggggggaaaacaaattgattttagctgataatacctggtggcaaacaggaccctggtccttgctcttgcaatagacttgcctttgttgacattagcttgcccttcagttgcctgctctcccagtgaccttggtgtgccaggctggctgagctctgctggtgggggtcaggcctcctgtgggaaggaagcaggaagaccagctggaaggagtgagagagaccctctggtaggaagacgtcacctgaggtgacacagcaaagcccggccaggtaacatagtgtctaatctccgccgtgaccagggccttccttgtatctctgctgcaggcgccatgtcagaaccggctggggatgtccgtcagaacccatgcggcagcaaggcctgccgccgcctcttcggcccagtggacagcgagcagctgagccgcgactgtgatgcgctaatggcgggctgcatccaggaggcccgtgagcgatggaacttcgactttgtcaccgagacaccactggagggtgacttcgcctgggagcgtgtgcggggccttggcctgcccaagctctaccttcccacggggccccggcgaggccgggatgagttgggaggaggcaggcggcctggcacctcacctgctctgctgcaggggacagcagaggaagaccatgtggacctgtcactgtcttgtacccttgtgcctcgctcaggggagcaggctgaagggtccccaggtggacctggagactctcagggtcgaaaacggcggcagaccagcatgacaggtgcggacatgtgcacggaaggactttgtaagggaccaggattctcagaatccatggtccaagggctgacctgtctggtcctggtccagcatgctccaggtagaaggaaacaggcccagagaggggaagcaacctccctgaggtcacacagcaagtaggcagcaaagaccaactagctaacatttattgggaatgttcattatgccaggccctttgccaagcttctaaggtagatttatttagtccttatagcaatgttataacataagacattcttgtcaccctgcccgcctttctttttgagacaggtgtcttaactctgttggccagactggagtgcagtgatacgatcatggctcactgcagcttcaaactcctgggctcaagcgatcttcctacctcagcctcctgggtagctgggaagctgggactatagttgtacaccactacgcccggttaattttttgagtttttgtagagacaaggtctcaccatgttgcccgggctggtcttgaactcctgagctcaagcagtcctcctgcctcagcctcccaaagtgttgtgattacaggcgtgagccaccatgcccagccccttgccatccttttagggcaaggaaaccaggctcagagaggtagagtgatttatctaaggtctcaaagtgaatttgccgttgggtcaagactaattataataacaacaactactgacgtttatatgggcccggcattgtgctgaacactttcatggattttgtaacagaatccctagatcagcactgtccagtaactctgcagggatgggagtgtccggtacaggggccacgagccacatacggctgttgtgcatttgacacacagctcatgtgactgaggaactgaattgttcattttatttgattgtagtctgtttaaacaagcacacagagctagtagtggttcctctgctgggcagcttgacttagagcagacccatgggtgcgggtgcggtgatggataaaatcacatctgtgaagcatggtgggacactccataatacccctcaagagacagagtggacgttccccgagttcttcctgttctcagcagtcggccccattggccccagggaagggtgtcctggccccccactgtcttcctcagttgggcagctccgccgcgtcctcttcttcttggcctggctgacttctgctgtctctcctcagatttctaccactccaaacgccggctgatcttctccaagaggaagccctaatccgcccacaggaagcctgcagtcctggaagcgcgagggcctcaaaggcccgctctacatcttctgccttagtctcagtttgtgtgtcttaattattatttgtgttttaatttaaacacctcctcatgtacataccctggccgccccctgccccccagcctctggcattagaattatttaaacaaaaactaggcggttgaatgagaggttcctaagagtgctgggcatttttattttatgaaatactatttaaagcctcctcatcccgtgttctccttttcctctctcccggaggttgggtgggccggcttcatgccagctacttcctcctccccacttgtccgctgggtggtaccctctggaggggtgtggctccttcccatcgctgtcacaggcggttatgaaattcaccccctttcctggacactcagacctgaattctttttcatttgagaagtaaacagatggcactttgaaggggcctcaccgagtgggggcatcatcaaaaactttggagtcccctcacctcctctaaggttgggcagggtgaccctgaagtgagcacagcctagggctgagctggggacctggtaccctcctggctcttgatacccccctctgtcttgtgaaggcagggggaaggtggggtcctggagcagaccaccccgcctgccctcatggcccctctgacctgcactggggagcccgtctcagtgttgagccttttccctctttggctcccctgtaccttttgaggagccccagctaccctttttctccagctgggctctgcaattcccctctgctgctgtccctcccccttgtcctttcccttcagtaccctctcagctccaggtggctctgaggtgcctgtcccacccccacccccagctcaatggactggaaggggaagggacacacaagaagaagggcaccctagttctacctcaggcagctcaagcagcgaccgccccctcctctagctgtgggggtgagggtcccatgtggtggcacaggcccccttgagtggggttatctctgtgttaggggtatatgatgggggagtagatctttctaggagggagacactggcccctcaaatcgtccagcgaccttcctcatccaccccatccctccccagttcattgcactttgattagcagcggaacaaggagtcagacattttaagatggtggcagtagaggctatggacagggcatgccacgtgggctcatatggggctgggagtagttgtctttcctggcactaacgttgagcccctggaggcactgaagtgcttagtgtacttggagtattggggtctgaccccaaacaccttccagctcctgtaacatactggcctggactgttttctctcggctccccatgtgtcctggttcccgtttctccacctagactgtaaacctctcgagggcagggaccacaccctgtactgttctgtgtctttcacagctcctcccacaatgctgaatatacagcaggtgctcaataaatgattcttagtgactttacttgtaat

SEQ ID NO: 18 - DNA, 30161 bp, Homo sapiens
atttttcatgggtttgcggacccaccagcgaaggcgggaggtgtcgcagggacatcttctggctgtttccgtcgcctgcgtggcccttgcaccccggtcttccattagcggcgcagacgtttgggcctaagcgctgggcgaggcgaggccctgcccctccccgccaacggccattctctggacctgtctttcttccgggaggcggtgacagctgctgagacgtgttgcagccagagtctctccgctttaatgcgctcccattagtgccgtcccccactggaaaaccgtggcttctgtattatttgccatctttgttgtgtaggagcagggagggcttcctcccggggtcctaggcggcggtgcagtccgtcgtagaagaattagagtagaagttgtcggggtccgctcttaggacgcagccgcctcatgggggtccaggggctctggaagctgctggagtgctccgggcggcaggtcagccccgaagcgctggaagggaagatcctggctgttggtatccttaacgccgcgttgggacttggggtgcagggattcggggctggattcctcgcggggctctgccttgggcacagtggcatctgcaggatgatggtcttgggtcggggtcggggtcgctatagaatctctgtcactaggttttctaagtacagtcgtccctcggtatccccggggctttggttccagcccctcctccgtataccacgatgttcaagttccttcaactcccttatataatggcgtggtatttgcatataaactacccacttccgtaatcttttaaatcgtttctagcttacttgtaatgccgaatgcaatgtaagtgatctgtaaatagttgttatactgtattttaaaattttttgtagtttttattggtatgttttatttatttatttttttccatcgcaaatatttttgatccgtggtaggttgattgcggaatcgggtgatgaggcgggccgccctgtctgctttccccagctttgcagtcttagcggcctgtgcatcctggtttgtcactttgtggcagtgctttatgttcctctctgccttagttctctcatctgcaaagtagaggtggtgatagtatctacacacaggattggaatgaggaataaagaaattgcctacatgagagaagtttagtgcgattaatacagtaaatcttaaagttattatcctgtccgggaggtcagtaaggagagcagagtagacttcgacgattagttttgcttgagtcttgccccatttatgtttcttagaggaaggatagtgtggacaggtgttttacccattttttaaattgactttttaaggactattgtttctgtacatgtttggctggttttgtttgtcattggaattaaattcttttttcattagcaaaacgtgatactgcttttgaaatttttatctttttctttgttatgtagtcattttttttttttttttgagtatctattctggctcagaatctggtgataccttacaccaatttcctaaatggggatctatgagtctaggggctcgtgggcttgtggaaagagtcctgtaaatgattgcggggggattggggacgggaaatggagtgcaagagtgtgtgggcgttcagcaaaggaatccctgactgtggagccctaattcttcagtaggtacaaaacttataaataaaacgacattgataagttttaaaacataatgagattatcattttttgcaagtgaataatctttaaataaatctgtaattgatttttggcttaaaagtttttatacagggtactttgaattggggaaagccaaaggatttttgttttgttttgttttgttttttgttttttagagcacatgcgctgttgctgccctcaagctgttgcttagtatcattgcagtctaaagattttctcagaaataaagggtaaaggttagttttcagtgacaagaacccttaaaacttcagcaaagatttagatcattttatgtagcagcccttgtgaagaattactaaagaggactgtggccaggctcagtggcttacgcctgtcatcccagcactttgggaggtcaaggcaggaggatcatttgagcccaggagttcaagaccagcctgggcaacatagtgaacccctgtctacacacagtcaaaaaattagctggacgtggtggcctgcacctttggtcccagctacacggaaggctgaggcaggaagattgcttgggcccaggcggtcaaggctgcaatgagccgtgttcatgtctgtctctgaataaataaataaaaaggactgtgaaagacattctagtcatgacaacctcatatatttataataaactcgtttatgtcaaaggagtatatctgattacttgttctacaatcggttttgctttatttcattttcacgggaattcagacacctgaaattatttagattttattgtattgtttgttaatgacaaacttacccgttattatactagtttcataatttactcttgtatctctatactaaattgtttggtctttaaaccatctatatagcttagtgtcttatttatacagtctaaatgtctgtgtcaaataatgcagaagtaagttaaacttttgtctcttatagattttaatgtttgtaatatgcgtttaagtgtattagcaagatattaccatctctttaggctatgtatactaatggagatttttaagtcacctaactaaagaactaaagaaacttattttttgtattgaaatgttattggtctttgggtcttataccgaaagtgatttttggctttgctgcagattttaacttttctgtccgcagaaatttaattttgcgtatataaacttactgaaattagacaagtcaaattatacaaatattttcagattgtctcatttttcatatttcttgtctaacaatttatgtgaatattttcaggtcgtctaattttacatatttcatctctaagaattcaagccaaaattctcaaccctagctgagaattggcattacctgtagttaattgaaaaataaaaaataaaagaagtcctacctcagtctctatgatttagaattttaggcccatggggtttaataatccgtatgtttcagaagcttcatatcctattctaatggatagcagggatgagagccactgatctgaaactagatttcctcactgaagttaaagtttaaagtagtgggccaagtagaaactaatttaatcctatgtaatagtgagcttcatggcttttccagactatacttgtagcaagcagaaacatcgatctaatacaagacagatgcacatcaacaccaagttctacctctgagatgtatcttttatccgatctcttctcgtggtctccaccactactgtctgcgttaacttgggctattgtaactcattttagaactggtttccttataatctgttcttcacatgttcatcaaagttatccttaaatcatgttctagaaacttcccagtggccgtatcacctcctgccattccttttgtcctgctgcactggcttcctggagatagggaccgtctctgttttgttcatggctgaattgtttggtgtatatccctagggtcttggatatgcctggcccatggtattgctaaatattatagaaataagcatagcagtagcttgctttccactaggtattttgttacatagtgttttgtaaattaattgttgatggacctacatttttttttatgttagtaaaagttaggcagtgtacattcatttaaatactaaactgttcaacttatttaatagcagatatttattgtgtataagagtccctgtgaaagggagtgcagtgcacaaattgcccgggcaagccatggagcacacaggctgggttttttccctgctagattataaactccatagggccaatactgtgttttgttcagtgcactggatatgccagtgcatagaaaaaatgctgccacataataaaaacagaaataacgtgataggtggccccttcaatgttcttttcctatgttagaaatttacctgcaaatattagcatcagtccaggtttctctctgttttttttttctttttgtttttttttgagacagagtctccctctgttacgcaggctcgagtgcagtggcgtgatcttggctcactgcaaccttcgcctcccaggttcaatcgattctcctgcctcagccttataggcacacgccaccatgcctggctaatttttgtatttttagtagagacaggatttcaccattttggccaggatggtctcgatctcctgacctcaggtggtctgcccgccttggcctcccaaagtgctgggattacaagtgtgagctaccgcactcggcctcaatatattttttaaataggaatgtatacaaggaggatgtcttcatctagactgaggaggggacccctggactgagaccttagagtaggagagaactaggcggagagagggagaaactgtttcaggcagaggaagcagcatgtgagaagaacctggaggcaggaaggagcttagtgatttctgggtttgaggaaagcccagtagcaggaagtgagcagaggccagatcattcaaggcttcctagaccaggagaagaagttttagatagtatcttgaaggcagtgggaagctttggagggttttcaccaaagatacgttggtgaaatctagtatataccttcaagatacattagaagatagaattgatagacctggtaatagctataggtggtgatgcccagcattctggctcaggtgaatggcagggacattcactgagatgggggcatgagcagctgagtggagaagacatggagttcagttttgatcatgttaagtttgaaatgtctatgaggtatggggtagagacgtcatctgggctctctgttctggggtcaggagcgtgctctgggccagacatatacatggagtcagggcgtggtgtatgtggaggggagtggaggttgatagttcagacaggaggaaagaagagggcctgagaaagatcactgatgaagtgaatactttaacagtgttacaggagctggcaaagagtctgagagcaggaaaaccagcagagcgcggtgtcactctttcttttggacaaatataacattttttgagaagcactttttagaaaagtttaaaaatataagaaaacttcaagatgaaaatataagttatctttagtctcagcagacataatatctactttaatattttggtatgtgaactagttttttatatttaacatatatactgtatcagaaaatggagttatactttatatggttttatagcctgttttactatctttaataatatttaatgactatcttccttatcacacatgctcctgcaacttccatttttaagggctttttggtattccagcaaataggtctgccataattagtttttcttttttgagacggagtcttgctctgtcaccaggctggagtgcagtggcgcgatctcggctcactgcaacctctgcctcctgggttcaagcgattctcctgcctcagcctcctgagtagctgggactacaggtgcgcaccaccatgcccagccaatttttgtatttttagtagagatggggtttcaccatgttggccaggatggtctcgatctcttgatctcgtgatccacctgcctcggcctcccaaagtgctgggattacaggtgtgagccaccgcgcccggcctatgattagttttttaaaaagacctgctggaaaacttttaagttgatttttatattttcattattataaacaagcattctgtaaataactctcattatatatccatgatgattttctgaggatcaatgtctggaagtggtaaaatagactgcaaagttttaaaaagtttttttcactatgaattgtcaaattgtcctccagaaaatttgtgctaattcatgaaaattctttagcaatcacttatttttttttaaagaagcaattctttgcaatgagacttcttaaaaggatatgtctgtctttgtatgattttaaaatgcagtatgtgaataggggtaacaagagttcaactaaaagttaactgactttaggtagatcccatgagagctaaatgtttttcaattttaaatgaatagtgataagtatttagtgttcaacgtttggataatatcagttattaggaaattgaagttgtgaggatgaagagaaaaatcccggagttttttccattaacaattctcccagatattagcatttggttaaaccaagcacttaaaggagtccgggatcgccatgggaactcaatagaaaatcctcatcttctcactttgtttcatcggctctgcaaactcttattttttcgaattcgtcctatttttgtgtttgatggggatgctccactattgaagaaacagactttggtaagtgtcgtatagtttttagtaagtgtcaaataatttttttctttctgcattcttagaaaaattcacataaaatttttgttttctctttagaattttagaaacagacttattttgacacatacttaattacatctacttttttatcttgaacaattaatttttcttttaaaaagttttatgagagttcatcatgggtacaatgataaaatttaacttttaaataaaactaactactaaaaaccttgctgttgagagttttcccttcagaggatcttgttaggtgttttatatttatttcaaggatgcggccatcactcagaacactgtggaaaccctcttttgggaagtgcctccctgaatctgagatcaagtatcctccgtgatagcaagccttcttttaaggggaattggattttaggagtaagcaatgttatgtggtgccaagtggtgactaaagtggattatctaggaaggaaattgaccatgatatagaagagtcagaatgagttgctgctttattgttctggaagtagttttaaaaaatgtttttggaaggccgggggcaggaggattgcttgagcccaagtccagcctgggcaacacagggagaccccatctctaaaaaaatgacataaaataatgtttaaacagtccaaatgacagcacccatttggatatatgacttttatttgttgaaaataccaaagtaatgaaatgatgactttgtaatcataccagatactctctaaatgaggatataggataaaagtaaggatataggataaaaataaaaagcatttataaatgctgggggacctttgttgcctcagtaagagtgtctagtcttgaatgttgcagttttcagttacccaaggcatactgtaaatcaggtactttgtggaaggattagaaaggaaaagagaatatcttggttatttttatccgatattcagccataagcacagggactatccatttgtcactacttgaacatttcttacaagatatttctatacattttagaatttctcatgatatataatcttgaatattgaagggcagaattacatgtaagtaatgcatgtttataaaaagcaatattagaaattgtttttggtgtcactgtgacattttatagaataaataaataatttcttttgggaagcatttaagctttccacttcttgggcatattaaaagacatttaaaagaaactgaaagtaaattaagtttcccaaatatattgtgtagtagcccattaagtaatagatggaaactctgggtgtcctttacgtagcagcaacctgaagatatacactgatatggcaattaggaggaaatgctaaagcagccatagtctgaaaactcagacaaaccaaattctctggaaaataaatcacagcaatgtttctagtggtctaatatcctgaagtgagatcttacatcctttcttctcataggtgaagagaaggcagagaaaggacttagcgtccagtgactccaggaaaacgacagagaagcttctgaaaacatttttgaaaagacaagccatcaaaactgccttcagaagcaaaaggcaagaggaaaattatagtcgtgttagagatgaagttttaaaaaagtgatttttgtcttgatttcctgcgattctctttccctatctaattttgactctcaacagaaaatagagagtgaaatgagacaagtaggctgccattttgacctggtaatttggagttgtggcaattctccgttctgtgagaatcaactttgctaatgagaaaaaaaagctgtcgtgttgcgtcatgtacactttttactttgattatggtcttcttgactctaggtgagcagccccgccaaggttccttcctttctctcggctgcatttattttccacagcagtggcctgagagcagccaggtcaggtccctgttcaccatcctgagcagggtctgcataatctgtttaaagatttgtgtactttccagagatgaagcactacccagtcttacccaagttcgaagagaaaacgacctctatgttttgcctcctttacaagaggaagaaaaacacaggtaaatgtttaactatttaagaatattattttagtcattgctacattcagacacatttaaaccttgatgtgttatctacatgataaggcatgtgaacatttcttaatgcatctgaaataggcatgctctatacctttcagaatatttttcaaagactaaattttttatttactattctttgtgttttggtgattcatgattcttattcctcttcattctaaagaacttctgccagggctgtggattctaaattctccaaggcatgaattttagttttgcttacactttgcttacacatgctgtctctagctgcttttcaatccagtatggtctctctcaccatgatgctaaaataccacaacccatgacattcttgttgctaaatctagcagacgctttgcacgtcttagtgtgctcgacttctctgcactaaacaccatgccacactgccccgctcccccggcatctctctggcgctttctgctcagcctctctgtggactcctcttcctctgtctctctcttaatggttggtggtttctgtgtttgaagtgaaggtggagaaccggaagcttggcagtttgcctttgtcccctgtccttccctccacctcttcctttcccaggagttcccaagagacaacttagcttttgtatcagctcagttctatttgtctccattgctaccactgtcattttttctccaggttacattattagcttttaaacttctttctgtctttgtctttgatcataccctttttgtaatagttcctcccaccaagcccaatctctgttttgtgttatagtctgtttaaaatccaaatctgatattgtcatttccttacttaaaacactttctagcttctccttctcatttttttctttcttttttttttgagatggagtctctgttgcccagactggagtgcagtggcacaatctcagctcactgcaacccctgcctcctgggtttaagcgattctcctgcctcagcctccggagtagctgggattacaggcacgtgccaccacacctggctaattttttgtatttttagtagagacgaggtttcaccatgttgtccaggctggtctcgaactcctgacctcaagtgatccacctgcctcggcctcccaaagtgctgggattgcaggcgtgagccaccacacgcagcttagcttctcatttctttaggataaaactttaactccttaattacactttccagtcttatccctgcctttcttcacatcatccacaggcaggctttcttttccttgtttctatatggtcatacaacttagttcttttgcctggaacactcttctccatgaaccttcccgctccctacaactacactcattaattcgtggctaactccaaccagtgtaattgcaggagatcctggaaagcttttgtgactcctaaattgggtgaggtgactccctattgcatctctagtgacctgcccttcccttgtggtggaagttattagatcccactctaattgcttacttacacgtgtcccccaccagaccatgagaccagtagtggcacagatcttgctgttttattcaccactgtagcccgtataacgagcagagccttgcatacaagtatttttgtaaggggtccttaaaaatcatagatatcgtaaaagtatgtttgactttcagttcagaagaggaagatgaaaaagaatggcaagaaagaatgaatcaaaaacaagcattacaggtatttagatcatttttgaattcagaatgtattctgttatttgaaatgaatgacatgaaaatgaatattaatgaggtatatcaaactgtgaaagttcctgataaaaagtaaagacagatggctttttggttgtgcatatatatgtgtacatgtatgtatttaaaacacactcacctacacacgtgtatatatatatatatggaatttgccattatgcacatctatatattcaaaacaagctatttttcttttacaaccaaccaaccaatagtaatatgtgcttacatagaaaatatagaaaacatatcattcataaataacttgtaataacagtttgatatattttcatccattctttgcctgccccatatagttgaatatctgtgtgtgtatttgtatatatgtatcaaatgtgcatgtgtacatatatatgtgtacacatatgtgtgtatgttctagttatctgtcgctgtgtaacttagtggttaaaacatcatttgttatcgtcatctgtctgggttccaggggtagatgagctcagacaggcagttctctctggggtctcttgtgtagatgcagccagtctgtagctggggctggagtgattaacgaggtttccttgctgccatgggcggtggttgatgctggctgtcagccagtcttccatgcggccagcaccagagcacctacttgtggcctctccacgtggcctgggcattttcccagcatgatgactgtattcccagtgtgggcatcccaagagaaagttctaagcagaagccctgttgcctttctgacctagctttggaagttgtgcagcatccttcccactacatcctgttcctcagaagctagttactgccctatggaaggggcagagagttagacaagaagaatgtcccacacatattttcatgaataacatttttacaaattgagattatgctgtatatatacatttttttcataaacatttttcaagtttcttagtgtcacagatagcattttttgattcccaaattcactgtttcttgtttgttcatatggttttgttctatcaggtagaaacttttgagctaaaacctcgagatccttcaggttgcggaggtgctgtgctattaatgcagctagtgagagcaatcttagttaagaccatgggcctcgtggtcaaaaagacctgcgtttcagtccaggctccactgttcactagctgtgtgatcttacacagattaaattctccaaggctttatttttttttgtaaaacgaaattgatatcaatgccttcctgatgggggtgatgggagcattagtgagggaaagcacaggaaatgctgagcgcagtgacaggtctgtcctacgtgtttgctggttggtacgtacacatgtaacatacagacatgcaggacatcaggttgtattagcttatcttttttactaatgaaggattttaaagtacttttggtaatgagttaaagttgagaaaagttttacacttttccatgtcttctgtgaatttcttttaatttcatttcttatgttataagcaaaataaaactaacttaattatgggaatgatatatattgcttgaattcctaaggcacattctgtcttgggttcttgcattttctgttctctcagcctgaaatgctctatcctcagtgaggctctttgatatcttccaagtccctgctcacacatcctctttttagtggggtcttctttatctatcaaatagatctttttttccacgttctgttcatgtaatcactctcatatcagataaatctgctttattttaccattatcttgttcatttatttatttatttattgtcttctctcctctgctcctaagagcagggaccttatctggcaccttatccgatctcacagtaccttagcacctagaacagtgcctggtgccttagaggtacctgctaagtatttttttcttttgaatgaattaaagagtgaatggctacattccctaatttgcctactcactttgttgcctgtcacagattatatgcaactgtgtttagccaattgttgattatgtagaactgtgtttattatataaacataatacatatccttaatgttgaatagaactaagtgtatgaaatgtaaatttcatggtgctgtgattttatctttacaggaagagttctttcataatcctcaagcgatagatattgagtctgaggacttcagcagcctgccccctgaagtaaagcatgaaatcttgactgatatgaaagagttcaccaagcgcagaagaacattatttgaagcaatgccagaggtgaaatatgcaacagtacattcatgcttagaattaagaacttcagcaaaactttttattagaaagaagagaaaattgataagcaatacttacacgatatctcagttaacagtaaacagcatttctacatctcagattctaagaagcatcgtatatttatacgtttgagcctatagacatttactctaagaagtttttcttgacttttgacccgagactaggtcttttttcctggtctttgttctcacagcaccctgtaatatcacttcatagttcttagttccaaaacacgcttatcttgctcacctctgtattttcagtgtctagctcagtatttttcacatggtatgtgtccagtagatgcttactgactcaattcttaggttaggtcataaaagttattgtaacctataatatacattgtctataaaaactaatagtcatatagaatctaatcacaatggaaaaataagttctaaattgaaattccaggtatatcttcctctgctgcagccctagagatgccattggctctccacattcccttgccctcttcctggacagtgcgaatggggcttcttcaccttggaacatcttgtagcttggcaggcccagaaagctagagtggaggtggtatgtgcagttgggtgctagcaaatgtgtctcctgatcatgctgccattgatacttaattcatgttactattgatgactccctgtcttagttgccagtgagtgagttctttttctctttctgttgctgctacctgttatttctaccgtagttctccattcacccactataggacagaatcgaaattttgcagcatcatcgaccttagtgcatagatggagtgtttttttattttctacaatttttgaatattgcttaaattgatagcagaaatatgaaaaaggaagggtaaatttcttttctcatcactccctgttttttccacaaagaatgtgcagtagcacacactaaggtgcacagaagtgacattcttgggtctttggatatacaaaggacagaagtaaattgatttttatttcaggagaaaaatccaggctcagtctgtctatcaggcattttatttcttgagtatgaaaggatctctggctggcagttgaggaagtagaattttggttgtgtaaacaataacaggaagaaatgggagaaagagagacagtccctaatgatttactgttctttattttctttctgcaaccatgaagtctctggaagtggtggactgtagggtggtgtggagtagcagcttactggatctgtaattttgatagagatgttctaagtcatccatgttgggcctttgtgtgatctgtatgtcgtgcaaatgtaatattgataatagtagtgatggtaggtaataatagcagtagtaataatcataataccatagttccactttactcacggtttgcagttttcagtgacctgtggtaaactgtggtctgaaaatattaaatggaaactttcagaaataaacaattcataagttttaagttgcacaccattctgagtagagtgatgaaatctcacaccctcctgctccatcttgcctggaacgtgaatcctccctttgtctagcatctccgtgctgtagatgcttcctgcctgttaatcactgagtagctgtcgcggtgatcagatcaactgtcgcgatattgcagtgcttctcctcaagtcactcttatttgacttaatgatggcacaacagtgcaagagtatgatgctggcaatttgaatatgccaaagagaagctgtaaagtgcctcctttaaatgaaaaggtgaaagttcttgaattaataaggaaagaaaaaaatcgtattctggctgaggttgcttagatctgcataaaaatgacttttctatctgtgatattgtgaagaagcgaaaagaaattggtgctagttttgctgccgtaccataaactgcaaaagtcatgacctcagcgtgtgataagtgctcagttaggatggaaaagccattacattttggggtggaagacatgaagagaaacatgttctgattgatgacaatcaggtttggtacttctgcagtttcaggcatcctctgggggtcttggaacataccccaaggatgagggggctgtctactatgttaatagaatcaattgtagtaaattgacatgcttttgatcccagatctaccacttattagccctgtgactctagggaggttacctaacctatttaagtcccaatttcttcatttataaaatggaggtgatatctgtttcataggatgattgtgagaataaaatgaggtattatatgtaaaagcacttagaaaaatgccctccatgggaaatgccttataatgttaagtattactgttaataactgtgattactgtgatttattgtgtcttttatgggataaggttgtgcaggacacttcacttgcatatttacctacattctagaagattgttaagccataatcagatgtcatagtgactgctatgcattacatgctcaatacatgtttattgaataatgattaaatcataaacagtattcatgatttttttttttttttttttgaggggaagtctcgctcttgtccctcaggctggagtgcaatggcacaatctcggctcactgcaacctctgcctccccggttcaagtgattctcctgcctcagtctcctgggtagctgggattacaggtgcctgccatcacacccggctaatttttgtatttttagtagagacagggtttcaccacgttggccaggctggtctcgaactcctgacctccggtggtccacccatctcggcctcccaaagtgctaggattacaggcatgagccaccgcacctggccatagtattcatgatttttttttgcccaactctttcgaagattatttttttaaaaggaagctgtagtttttcttgttattcaccttttataatatgaaactaccatcaatgaaaaaagccaattgttctttgttccctgttggggaaagggtggaaatatggtaatattatctgtatttaatataaaacagtaattttgtttgtttattttgcctttaggagtctgatgacttttcacagtaccaactcaaaggcttgcttaaaaagaactatctgaaccagcatatagaacatgtccaaaaggaaatgaatcagcaacattcaggacacatccgaaggcagtatgaagatgaagggggctttctgaaggaggtagagtcaaggagagtggtctctgaagacacttcacattacatcttgataaaaggtatcaggcaccatcatttatatatttacattaaaaaatcaaagatatatcatgactctgaattctataaactagcacccctggataatattaatgaaattctatttatgtaataactgtatactgctattaatggattaactactatagtgccaaaccactttaaaattagctaatgaattaactcctagttgccgattaaatgaaaatgtatatacttatttatgagaaccagtgttctcttatccatcttactagaagcgtattgtcacactgtaaaactgaatggtgagaagtgttttaattcttcttaaggtattcaagctaagacagttgcagaagtggattcagagtctcttccttcttccagcaaaatgcacggcatgtcttttgacgtgaagtcatctccatgtgaaaaactgaagacagagaaagagcctgatgctacccctccttctccaagaactttactagctatgcaagctgccctgctgggaagtagctcagaagaggagctggagagtgaaaatcgaaggcaggcccgtgggaggaacgcacctgctgctgtagacgaaggctccatatcaccccggactctttcagccattaagagagctcttgacgatgacgaagatgtaaaagtgtgtgctggggatgatgtgcagacgggagggccaggagcagaagaaatgcgtataaacagctccaccgagaacagtgatgaaggacttaaagtgagagatggaaaaggaataccgtttactgcaacacttgcgtcatctagtgtgaactctgcagaggagcacgtagccagcactaatgaggggagagagcccacagactcagttccaaaagaacaaatgtcacttgttcacgtggggactgaagcctttccgataagtgatgagtctatgattaaggacagaaaagatcggctgcctctggagagtgcagtggttagacatagtgacgcacctgggctcccgaatggaagggaactgacaccggcatctccaacttgtacaaattctgtgtcaaagaatgaaacacatgctgaagtgcttgagcagcagaacgaactttgcccatatgagagtaaattcgattcttctcttctttcaagtgatgatgaaacaaaatgtaaaccgaattctgcttctgaagtcattggccctgtcagtttgcaagaaacaagtagcatagtaagtgtcccttcagaggcagtagataatgtggaaaatgtggtgtcatttaatgctaaagagcatgagaattttctggaaaccatccaagaacagcagaccactgaatctgcaggccaggatttaatttccattccaaaggccgtggaaccaatggaaattgactcggaagaaagtgaatctgatggtacgtgtctgtgcttttgtagaaatctggaacggtaggatttcccctctgtaggaattcagagatcggttagtgtagtcccgttttaactttttacagataaggaacgagagacgtagaaagaaagatgaaatgactttcccagggagtcacagctggtcatggaatcttgaccttccctgtgttgctctgctttttgttatcatttttaaaggcatgaagtgccctatttggggaaggtaaagttgagtttccctctagtttttaaaaactttttattttgaaataattatgaactttaaaaagttggaagaatattataaaacactggttccttcatccagtacctcagtggctagcatgttaccacattagcttagaatttctcttggtctctctgtggccctctatatgtatatcatatatctccaaatctgtatacatatgtataccattgatcctcattatttgtagattccatatttgcaaaattgcctgatcactaaaatttatttataactccaaaatcagtactcaccgcaatgtctttgtggtcatttgtggacatttgcagagttggggaaaagcttgagttgccacactgtcccctgctgaggttaagcaaggtgacactctgcctggttcccgtgttctgagagagatgaccagagggtggggacagtaggggattatgcaatggagagagagcaagaagctccggccccaggccagttggaccagatttgaatccctattctggcacctgttagcgtggcagcttcacacaggtcactaatttgtttcttgaactttgtttcttgtttataaaataaatggaatctattaagatggtggttttttaggatttaagataatatatatgaaatgtgttcatatatatgttatatatgcatatgtgtgtatatgcacatagatatgtttaggagcaatgactcggtattggctaatttagtgttcacagagacttcatacgtgatggccactttgaataagagaatcaaccacacacacacacacacacacacacacacacacacacacaatttgttcctggtatctgctagttttcttcattcaaatgttactatttcccttttgtaattaataagtattttgtggaaaaggaatttttggagctatataaatatgctgttcctgaacaaacttccacccacttgttagcatccattgatgtttacctgaataatttgttactacgttggttgccaaatgatggtttttctaactccatcattccttatatattattacttgacatcctcctatgaggaagatcttttccttctccccatttatttttattatttttaatcagtgtagactcctgtattcctatttagtgagttataatccaatactgtcataatttactttgttactcaaattatcacagctttggccattggggctccttctaatggctttcagcagttttttcattatattttgagcttttccttgctttctggccaagctgtttcaggcatatgttgtactttctctgccctggtcctggaaccagccatttcaccagggagctctggttcctttcagtggagcatggggtttagacaccacaagctggatgtgagtgtgcttatggatcctgaggtataactgtctcaggccttttcagcaacagtgccaggaagtatatttatgtatacatatacatgcacacacacatctatatttatttctatgtctatctgtactaaaatccatgagtttatactgacatctgcaattccatggggttcagtctagcctcctgcttctttatagtttccctaacaatgagaaacattgctccccttatcctcaatacatttacatctgcttattctccctggatatgtaaccatctccccctcccactggcctcctccttggccctgctctcttctttgcttcagctgtgtccttggtgccagctcccagtccctgagagccccctcctctgttctgattgtctccttaaacccagctggacaggccttgccagccctctccacctacagggaaggaaggcaaccattaaatatattttaaggagaaggaaagacagtaagacagtaagagaggagagaagggaagtggaagaggaagaactatttcttagtcacagctttattctgtgctgtgtaaatagcataaaaacatactgagcaacttccatgattgtttatatactttgataatcctcctttttgaatttttaaaacaatgtcagttaacttagaacatatttatataaagcgaatatacaaatcttaagagagtttcctactttcaaagacagtgccagtttacctaattgaaaaggcttgttttgaagttacaggcatttgtgattacatttatttattaataacgctactattacatgtattctgttatagtcatatctttcctttttaggatgtagcatttttcaggttcctccagaaagctcttgatgattgcaggatcattttaatgttttgattgtagatgaagtgaccttttaattttggtacaggaagtttcattgaagtgcaaagtgtgattagtgatgaggaacttcaagcagaattccctgaaacttccaaacctccctcagaacaaggcgaagaggaactggtaggaactagggagggagaagcccctgctgagtccgagagcctcctgagggacaactctgagagggacgacgtggatggtgagccacaggaagctgagaaagatgcggaagattcgctccatgaatggcaagatattaatttggtaataccgtaacattgtgtttcgacttcttgctgaggaagccaggttaagtaggttttgagttttaaggagttggtggatgagtatttagtagctatttgcagtacatcttgtggttgctgatggcttcatttttgtgtaggttactggctgggatagactccgttttccatgtggtttagtgatgaatctctaaagatattacagagtcttggttagacatccagtggagtacttcctaaggagaaagagcttattggtaatttcagtcagactaaatgcaggctttttgtaaacaaaactcatttggattattaatataaatctataaatgaaaaaacattttataggaggagttggaaactctggagagcaacctcttagcacagcagaattcactgaaagctcaaaaacagcagcaagaacggatcgctgctactgtcaccggacagatgttcctggaaagccaggtgggtgcaggcagcttgggtttcctttaccaccttcttcagacccctgggggaatgcactgcatgaagggggtatgcactgtgccccctggtgctcagggcctggtgatgccgttccctgggggtcactgtgtgtccctaactctgcaggaatgaatgcattacatgaagtggtaggcactgctccccctgtgctcagggcctggcggtgcccttccctgggcgtcactgtgtacccctcactctgcaggaactcctgcgcctgttcggcattccctacatccaggctcccatggaagcagaggcgcagtgcgccatcctggacctgactgatcagacttccggaaccatcactgatgacagtgatatctggctgtttggagcgcggcatgtctatagaaacttttttaataaaaacaagtttgtagaatattatcaatatgtggactttcacaatcaattgggtaagacttcagagtctttttgattactttctgacatttaccttcagagtttgtcctaggaagttttctttccaaggaactagtttgatgcattgatggaaattgcaggtctatgcaaatttttatatgagtgatctttggcttatatagaggaataggattttaaacatttgaattaaggaattaaagtcctagtatgtttaggtagttaatcaactgacttagttaaactttgactagttacccgagatctccacagtgaacaaaaggtggtggagaggggaagcaggccgcgcctgggcctgtattcgggtttctggcactgatcttcttctgttcatccagcaaatatatgtttggtgactcctatatgccagttgttcttaacaagagggaaggaacagagagtaaaatagtaggagaaacagatgataagcagatacataaatcataatttgacagttggtggtaagtgccaaatagaaaaatataacagtaaaggagaggagagagtgaacttcaggcatcgagagtgcaggtgctgtttcagagagttgttgggaaaggctttactcgtgtaacttcaaggcagggacctgcaggaaataggaagcaagcactgtagatagatacctcgggactagtgagtgaaaggggctgaggcagaagcttgtgggctgtgttctagggaagcaaggaggccagtgtgagaggaggagggaggaaatggcaagggttaatcttagagaataggaagaagctgaaacccaccagggtctggtgtgctagggtatgcaggcagattgaatgtggggtgggagaagaatgaagtcgaggaggattccagatactgagcagctggtcgagtggacctgccttcagtaagacaaggagggagcacagtggaggaggagaaacgaagtgttcaggtttggatatgataaattggggatgctcattggatacccagtggaggtgttgagttgatagttgaatatatgtgactgtggttcagagagactcaggctagatagctaactttgggggtcagcgtatagagggtatttaaagctatgagaatggatgaaactttaaaaatattaacagaatgccattgaataaaataatttattttcaaataataagatatttttggtggttggatatagatatagatatacacacgtacatgatttatataataaaatgtttataaatgtcatataagaaatcttgataaaaattaaaaaatattgttactctttaggattggaccggaataagttaataaatttggcttatttgcttggaagtgattataccgaaggaataccaactgtgggttgtgtaaccgccatggaaattctcaatgaattccctgggcatggcctggaacctctcctaaaattctcgtaaggtcttttatttctttaatttggataattgtgtaaatacccaaataagcaaatagaactattatttacagcatgaactgtcatgctgtaacatgtgaacaatggttcactgagaaagcagcagaaagtattggttgttttccattttctagagatgatgaaatcagagtcagttcttagtggtgctgggcttatcctagttcaagggtacaaagccagtcctgtggatttcacaggaatgtagaagttgccttttcatccattgacatacttatagagcagctatgatgtgtcagacactgtgctggccctggggaaaggagagatgagtaaggcataggccataccctcaaggactccccccatatacttggaggtgatggagaagcaaagcaaattgtacttgtctgtgtgtttggtgtcctgagagaggtcagccaggaagcgacttggaaatataatgccaggaatgttacatccagcactcctgtcctgtttctcaccatgtgaatcccgtgacgtgttcagtggtgaagtcttgctccatccagaacccagagtcgtgctatactcggggtacatttatcattttgaagattctgagatggtaggagttatgagtatgtctgggaaagtagttttttctttgtccttgatggcatctttttaaaaaattgaaatatagtcacataccacagagttcaccgatttaaagtgtacagttcattggtttttagtgtattcacaagattgtggtggcatcttttaaccgtcactatgtcgtgagatgctgtttggtggtggctgatttaatgatccttgagtgttctctccagttacatatcctgtgtttgaaagatgctaggatgctctgacctgaagagtcagtgactggaatcactgaaatgaacggcgaaactgttgtagtgatcatggtcttccagtcatagcacactcaccaatgtgttgtattttatactttcttcatttatctttttctgattttcttattgttgaggaaatttatataccgggaatgagttatgaggtagacatacgtcatggtaggtaaataacttgaaaacctacaaataactttattatacaaataaagtaaatacatcatagaaaattataaatatgtattaaaaagatgattacagtttacaatttgtttatgtaattttagacttcacacatatatatgcatatacattgcatatatatgtatactcatttgagtgtgtgtatgattttttttataagaatgggatgatgctatatactttttattttacctgtaacccatttggtattagaacaagacctattatcaacgatgatatagatttatatcgtttttaatggctacaggtagtatctttttgcgtctatcagggctagtttaatcaagtgtcttttgttatttctatttttagaaaggtattaacagacattgatttgagtgtccttaatcttcgggttcttatctaatgattattttagaataagtgaaatagtatctgacttttccatttggtttcttgataactattgagagtgaattttttatgttcatagacggtttgtgtttctgatttagtgaatgacctgtttatgctgttccacttttctttgttcagcagtttttgctcgtttgttgcctgctgaatcattttcatatttgagcagtttctgcctttggtcctccagctcgttgatgccagataggagcagccttcgctctgcctggctcaggacatttaggatgaatacagagtaaagagcaggaaggatggtgggaaaccagtaaaatcagaatgtggcctcactttgttttctgttctcctcttctgagggcaccctggctggtgaatcattcttagagtggggctgcattgggcctgcaggttgaattgagctgtagtcacatttggtttggactacacggtgtattcttctcttgagctttaattttcaattggctaccaacatttacctttgggagattttacacaaaattatggattctgttgggggaaaaaggagagctgaaaatactgggcctgaatttctggatagccccaaaatagctggcatggagcaacagcagttcccctcccctaccccaaggccttggactgggcatgaatccttcagtttcatcacagttgcctccactcccccagctcagctgattgacagacaccttcctcctttcatctttatgtgaagtgccaggccctcctgcttgaaggagtaaccatagctttggcttgatgagctcacaagtgcactgattctaactgccagtcatgattacagtttcaaaaacgaaaatctgcaagtaaagtagaggagaattatcggtattctctcagtgcactcctggaaagaatgttgtaaaagtaatgaagaaaaattattttttcctttttgcattttgttgttataatactttgaagaccgcaattagtaatttccaacgctagatggcactcctgcatcggtgaggcggaccctggccctgacagccggtctgagtgggttcctaatgctgcactagcaagcttgtgaagcgggggagcctgagctgcgggcgttttttcaggttccattgagtacatagattggtgaggattatgttagtaactttgatggcatttattttttcctaattgtgtaaatgtttctggtcagtcgtcactgcattacaaactaccttcagccttagtggcttcacacagcagtagtcactgattttgctcatgcctctgaagctcgctcaggcctggtgggggtgtcttgtctctgttccatgtcggctaggacagctcagctgggctaggaccccttaagatggctcgcggggctgatgaggtggcttcggcctcggggcctgggtggacacttggtgagcttggcttcctcatagcatgttggagccaagagcaggaggtccaggggacaggaagtggcgagggcctcccctaggcctggcacggcttgagtcacactggtcagccatggccgccctgctcaagaggaggccacagggacccccttcgtgatgggaggagggtccaagagtgtgtcgctgtctttatccggccgatttaggcttagaatggaaaacattgaaaaatgaataaaatataaagaagaaaatgaatggctgtgtgctcacgtagaatattgcctagcacacagcgaaataatagttgttagtgttatttattttaagtatctgtttacttttctcatatatgtgttttttccaaaactggaatcatactttaagtagagttctattatctctgtttttgtatatatttatttgttttacatacatatgtatttatatatatataaaatgttaaattttaaaaacagatacatgtatctgtttttacagattttttaaacaaatttaacattttcttggcatatttacattttattaaatattcttcgatccattattgtatttgatttgaggtaaataatacagatacattacttccattttactgctgagaaagagacccagagaagttgtaacttctgtggtataattatgagtgtgggctctagaggaagactgtaccaattccagctgtgaaatcttgagccagttacttatttttgagttcagttccctcctctgtgaggtgagggtaacgatagggcatggcttgtgtgatgattgggcatgtgaaatatttaacacagtgccaagcacagaggaagacttccataaatgtttgccatcattatacattgtggctaatagtactaaaattaataaaatattctatatagcatacaatttgagttagaacttgagtttacatgttctaagtttagttcttcatccatagtgtatgaactataatgtctcattgctgtgtaagtaattgtttcctttattttacagagaatggtggcatgaagctcaaaaaaatccaaagataagacctaatcctcatgacaccaaagtgaaaaaaaaattacggacattgcaactcacccctggctttcctaacccagctgttgccgaggcctacctcaaacccgtggtggatgactcgaagggatcctttctgtgggggaaacctgatctcgacaaaattagagaatatcctttgcttcttaaaagagaaggaaacaccttgtcaaatatgtgtttggtttaaaacttatggaagagaaacttggatcatttttttcttatatcccgttaatcccattttcttaatatcccgctctccttttcactctttcttccctctcctcagttgttgttttttgtttgtttgtttgttttaaaggaacagtgtatcactctgtcacccagcctggagtgcagtggtgcaatcatagctcactgcagccaccacttcctgggctcaaggaatcctcctgcctcagcctcctaagtagcacaagccactgcatctggcccctctccttagttttaaagagggtctttgtttgaataagcagtgataagcattcatagatataaccacatacttaaatattattgattctgaaagaaggaaagatgactaatcttgtcctttttattactggttgtcctttccgtgtatatttaagtaatcatttggatagatgtttcaaaacttgcactagaattaatccaactacgtttgattttttctcttaatgaaataggcaagatatctgaaacttgtttttattccagttaaccttttttcatagtcacaagtctttgatgtcctaaagtgagagctaaatatgttttattttatagaattgaaaagaacatagtgccagatgattatgctggagtcatttattttgttagtactttcttttagcactctaatctttataaataggaaaatcttaggagatacagggaatggaatcaagaatgggttctttggacctttttatttgtcacttgtttaaatatctttcaaaatatttataagtcttaactgcatgcatattttgtcagcggtatttcggctggaacagaacgaagacagatgaatctctgtttcctgtattaaagcaactcgatgcccagcaggtaatcatggtggacccttctcctaagttcaggatgaagggtaggctgtggttgacagctgttaaagaccagttaactcttattttggggcatagagcagacattttgaaattaggataatttagatgagagaatagaagaaaatagaaaaagaaaagttagactttggcttcattttctatgatcactcttagggctgaactttggagtcctttcatattcatttttttctttgaaaaaaccagtctaataactgatttcacactaaggtgtttctgattaaatacattaccccttgggatttactttcattttttaacgaaaggaagtcttcaaagcaattctgatcatttaagtttttataagtactaatatttttaaattctataaacgaatcttgaaaggtagaagttcagtcattattgtgtatcagtaggagaggtttttgtgggaaggagcccttttgtatgacctttagttcctctaggtacctacttcttgctttatctgtgagtatgttctgactcacacaaaacaagctttcgcccacactagaaacaacccacaaaacatacatacaaataaaccacttagcagaaatgagaatgtagcttttgtgataatatatttaaattaaacccattttcattaggcttggataattttgaaaaacatgaacaaaactaagacagcatttctatgagtttctctttgttttttggatgactatctactggaaacattataaaccaaccaaaaaggaaagctatttgtcttagtgtctggtgatttcttaatttcagataaattttgttgtaatatttatctcctttttcattctaaaacttaatgtgtttatttttccaaaattagaaaatgaagaaaatgaattaaaactactcattagttacctcctctaatacagttgttaacatttaggttaaaaaattttcctgcatttatttgtggccatactaaatgtaacttaatagatctaatcctcccccccaacttattagcatattttcttctatgtattgtgtggttttcttaattccagatgactagattatatttcatgaaagatatttaaataattagttcagtttacttgttagacctttaattttcaagtttgttatagtaatgctgtgatgaacattaggcatatagctttacccatatattttttttttgagacggagtctcactctgtctcccaggctggagtgcagtggtgagaactcggctcactgcaagctccgcctcccgggttcacgccattctcctgcctcagcctcccgagtagctgggactacaggcgcccgccaccacgcctggctaatgttttgtatttttttagtagagacggggtttcaccgtgtaagccagaatggtctcgatctgacctcgtgatccacccacctcggcctcccagagtgctggggttacaggcgtgagccaccatgcccggccaaagaatatcttcttaaaagtgaatttactgaataaaaggcatgaatatttcttacagttgctaatatatactgtgaacttgcctctcaaaggtattgtatgatgataatgtttttaaaagaaagatatagtaggacttagaaacaggccccatgaagtcgtgttgctcctgaggaagatgaaatgtttagctacagaaaaatatttaacgctctttgaatatcttaggaagagatttctcatttgagatgtggactaaagacttagttgacagagatggtacaagtactgctttaggtatgatttagaaagtgaaaattactgtcagtaattcactgggagagaactgggttttgggagataatgaattaatattctctgacatagtaatccaatgtgagtgatcaaggttgagcttgttgatttggtttagaaacttgacttacttgtctgatttattattattattcttttgttatttttttagacacagctccgaattgattccttctttagattagcacaacaggagaaagaagatgctaaacgtattaagagccagagactaaacagagctgtgacatgtatgctaaggaaagagaaagaagcagcagccagcgaaatagaagcagtttctgttgccatggagaaagaatttgagctacttgataaggcaaaaggaaaaacccagaagagaggcataacaaataccttagaagagtcatcaagcctgaaaagaaagaggctttcagattctaaaggaaagaatacatgcggtggatttttgggggagacctgcctctcagaatcatctgatggatcttcaagtgaagatgctgaaagttcatctttaatgaatgtacaaaggagaacagctgcgaaagagccaaaaaccagtgcttcagattcgcagaactcagtgaaggaagctcccgtgaagaatggaggtgcgaccaccagcagctctagtgatagtgatgacgatggagggaaagagaagatggtcctcgtgaccgccagatctgtgtttgggaagaaaagaaggaaactaagacgtgcgaggggaagaaaaaggaaaacctaattaaaaaatatgtatcctctataattagttatgacagccatttgtaatgaatttgtcgcaaagacgtaataaaattaactggtggcacggtctttgta

SEQ ID NO: 19 - DNA, 37242 bp, Homo sapiens
gcaccgcggcgagcttggctgcttctggggcctgtgtggccctgtgtgtcggaaagatggagcaagaagccgagcccgaggggcggccgcgacccctctgaccgagatcctgctgctttcgcagccaggagcaccgtccctccccggattagtgcgtacgagcgcccagtgccctggcccggagagtggaatgatccccgaggcccagggcgtcgtgcttccgcgcgccccgtgaaggaaactggggagtcttgagggacccccgactccaagcgcgaaaaccccggatggtgaggagcaggtactggcccggcagcgagcggtcacttttgggtctgggctctgacggtgtcccctctatcgctggttcccagcctctgcccgttcgcagcctttgtgcggttcgtggctgggggctcggggcgcggggcgcggggcatggggcacgtggctttgcggaggttttgttggactggggctaggcagtcgccgccagggaggagggcgggatttcggacggctctcgcggcggtgggggtgggggtggttcggaggtctccgcgggagttcagggtaaaggtcacgggggccgggggctgcggggccgcttcggcgcgggaggtccggatgatcgcaggtgcctgtcgggtcactagtgtgaacgctgcgcgtagtctgggcgggattgggccggttcagtgggcaggttgactcagcttttcctcttgagctggtcaagttcagacacgttccgaaactgcagtaaaaggagttaagtcctgacttgtctccagctggggctatttaaaccatgcattttcccagctgtgttcagtggcgattggagggtagacctgtgggcacggacgcacgccactttttctctgctgatccaggtaagcaccgacttgcttgtagctttagttttaactgttgtttatgttctttatatatgatgtattttccacagatgtttcatgatttccagttttcatcgtgtcttttttttccttgtaggcaaatgtgcaataccaacatgtctgtacctactgatggtgctgtaaccacctcacagattccagcttcggaacaagagaccctggttagtatttttgtctcgtgtaacttttaagaataatttattttatgaagtgataaactaaatttcgtatacctcaattgtagcatggctctgtaaataaaattgtatgtgcatagcttaaagtgtgctacctctggcgtaactgcgtggagttaaaaactgttaagaactggtcagtatttttttagccatttgccacatttgctttaaaaattagttccattacattgttaagcgtggttgaagttacgtttgttacgtgactgatttttttttcctttttgacctcccagtatttaatttttaaaaatggtttctaaaagtcaaaaaagttattcgtgcttgttttaaagatttttgtcattagagaaattttaaagtaaaacctgaaaattccaggctttttgctccatgtttccttttagattttttgtgtgcgtacccacatatatttacatttgaatttaaatctatgttattgtcctgtttgttgtactaacaagatgaaactgtagttgttctgtgacttgcatccttgtcaataaataaagtctacagaattctttttaatggctgcatagtattccacagcatgagtataccattttaaaaattatttatgcctttactgataggtttttaaaaattgcctcctgtttttgagtattacagatagtgccgctttgtacatgcatcccgtgtgactatttctgtaagaaagattttatagaattataggctggcctcggtggctcacccctgtaatcccatcactttgggaggccaaggcggaccgatcacctgagatgaggagttcaagactagcctggccaacatggtgaaaacctgtctctactaaaaatacaaaaattagtcgggcatggtggcgcgcgcctataatcccctgctgaggaggctggggcaggagaatcgcttgaacccaggaggcagaggttgcggtgagccaagattgcgccatttcactccagcctgggcgataagagcgaaactccgtctaaaaaaaaaaaaaagaaaagaaaaagattttagagaattagaactcctgagttctcaattttactatttgattgctactggtaacttgctcaccaaaaggctctaacagtttcactcctgccaatactgaatatcaccaatctttaattattattattattattttttttgaggcggagtcttgctctgtctcccaggctggagtgcagtggcacaatctcggctcactgcaatctccgttccccgggttcacgccattcccctgcctcagcctcccgagtagctgggactacaggcgcccaccaccacgcccggctaattttttgtatttttagtagagacggggtttcaccatgttagccaggatgatcttgatcccctgacctggtgatccgcccgcctcggcctcccaaagtgctgggattacaggcgtgagtcactgcgcctggcctcttttattattattactatttttttgataaaaggtactgtaccattgtttaaattcatttttctctagtttcttggtgaggctgggcacctttcctttttgtttttgtttttgttttttttgagacagagtttcactcctgttgcccaggctggagtgcaatggcgagatcttgtctcattgcaacctctgcctcacgggttcaagcgattctcttgcctcagcctctggagtagctgggattacaggcatgcgccaccacgctcagctaattttgtatttttagtagagatggggtttttccatgttggtcaggctggtcttgaactcccaacttcaggtgatctgcctgcctcggcctcccaaagtgctgggattacaggcgtgaatcactgcaccaggcctccattttgttaagtcatttatttcttctgggacttgcctagtcttatctgtccattttccttttagttttttaaaatttttcttagtaattggagtagctctatgtgtttcaagtatatttaacttttgttgtttactaatgtagcatttaattttatgttgtcttttccccattgagaacaattctgtgaagtaaaatttgttggcttttgaatttcatatcatgctttggaagaactctcctgtcccaagatcttgcaaatatattcctatattttcttctagatttaaattttttaaatatttagatcttcacctgtaatttaccttcttgttcttcaatgtaagattacaaatgctattatcttttatagctgttttctcattaatacatgtcttttaagtcactaatatactgatggctttccattacagatttttttttttttttttttttgagactgagtcttggtctgttgcccaggctggagtgcagtggcatgatctcggctcactgcaacctctgcttcctgggttcaagcaattctgccgcagcctcccgagtagctgggattacaggcacccacctccacacccggataatttttgtacttttagtagagatagggtttcaccatgttgtccaggctggtcttgaacttctgacctcctgatctgcctgtcttggcctcccaaagtgctgggattaaaggcatgagccactgcgcctggcccacacctgggtaatttttgtatatttaatagagacggagtttcactgtgttggccaggctggtctcacactcctgacctcaggtgatctgcctgcctcggcctcccaaagtgctgggattacagacctgagccactgcacctggcttccattacagatttttactttgaattattttatctaatttgaagctaatatagcatataataaaaattcaggagaaaaaaggttatttttaaatcttttttgagagagtccattctttagcctgaaagtaaagtgcatatgtaagcacagttaaaaaaaaaaaaagtgatcagaaaaattaataattcaattctatatgtattttaaatttttcaattgttaaataatatttgttttattgattagctggaaataggcaatttttaaaaatctgtttttaaggcatccccaatgggggtgctgtcagattttaaagttagacagaggaccggggcatattaaagagaggtgcagaggtaccagtttgtgtggtagtggcaagctgtaaagatacttgagttttgcagattttgataaaccaaaaggaagggagaaagtgcatagtatattacattcccctcccccatgacaattatttttctcaagaccatttgtaaaacctctagataaggggcaggcaaatgttagcctgtcagccaactttggcctgttacctgtttttgttttagtttttaaattttttttgtagaggtggagtctctcagtgtggcccaggctggtcttgaacacctagcctcaagcaaacctctagcactgtctcccaaagtgctggggttataggcaagagccacctctcccagccagctgcctttctttctgtaaggaaaattttactggaatgcaaccatgcccgttggtttacatagtagccatgctttttacttggatagaaccatttgtatgaaaagcttaaaatacttacagtctggctctttacagaaaaaaattgacccctaatctagttggcaggctccttgcatacaggtcatatgtcttatttgtaatttcttttgcagtacctaccactgtccagtgcatagtagaagctcaataaatgtttgtcaagtagatatttgaaatgtagactaactaagaggcagcatgatatagtaggaagaaaatgctgagttgtagttgagggacctgggttgttatctctgatctgttcttaattacccttgtcagcttgggttagttagttaggttctctagccttcaggaacctaatctttagaaagagaagattgataacaggacccactctaaagatttattcatttctctttgattctctaagttagcttgcaataagctcgttggatcagtacggtaagctcattggatctcagtaatttatggttgtttgtaaggcagtaagcaggtaatataaatagctgaaggaaaaagtaatctttgctcttttggattggatactgtctgtgatcacaactgatacttgatgattccatgatacttgcataatgattagatcctccccagcattttttccaaatcccctttattgaacttgatggatatgtttgctgcagggcctatagttctgggataattttggaagtataatagcagttcttttctctttataggttagaccaaagccattgcttttgaagttattaaagtctgttggtgcacaaaaagacacttatactatgaaagaggtaagctgaatcaagagataagtagtatctcactagttacatgtagccatacttaaagttttcaagaccatgtggagaaattggccatatagaaggatttttcattaagcagcaacatttaattttgtggtcgtttggactatattttaaagctgaaaattctaattatactcgagtttcatttctcagctaggaactcagataaatggaagccccgtaagggtgcttgaccattttatgctgtcaaccctttggtagactccttcccagaatcatgtttttaaatgtatgaaataaaatgtatagaattacaaaggaaacatactaaaatacggttaccaaaatagtaaactagtttgtgatatgtgtgcttttgttattaacataataaatactaagatttagaagaagatataataaatataatgtttttttgttttttgagacgaagtctcgctctgtcacccaagctggagtgcagtggcacgatctcagctcactgcaacctccgcctcctagattcaagcccttcttctgccttacccttccaagtagctgggattataggcacctgccaccacgcctggctaattttttgtctttttagtagagatggggtttctccatgttggccaggctggtcttgaactcctagtctcaggtgatccacttgccttggcctcccaaaatgctgggattataggcatgagccaccatgcctggccaataaatattatcttgatatagtgaggaatataagtcatattttgaaatgtttgccataagtacagtatgataggaaaacacctctgatttttgttggtgatgaaatcacaggtattaatactgttgtgatttgttgcctacatttataatcgaaggaaaagctaaattctagttagaagtttgtgaaaataagaatagaattttttttttcccatccaaattaatggaccccctgaattctatccaaggacttcttgggcatccctggatcccaggttaagaacttctgcactagagatacatgagtacagtatactgatctttctgggatagaggtgagctgattcatgaccatatattctatctaatggttccagcattttaatgcattccccacctttaaatttgtgcacagaagcatgattttcagtgacagattgagcaaccttaggcagaatttcagtgtgattgaaatatgcctgttctctgtctctcccacttagtttatgggactcagattacttaaaacatttaagtttctttcttacaacggtatagtggggcaggaagagcttccatttttctttttcctctccagctatacttttagaaacttccttaaaggatgtttggtagaataaatctaagttctcttcctttttcctttcccactgctggacagcaatctgtccaatccacagtcacataagaatattcctttaaggccgatgcctgcttagccagttaaatccaaagacagtgtttgtaggaaagggccaggttaaatggtatttttaaggctaatttgggattgaccttattatcattggataatcagttaaggaaacaaaaaagtatggatttagcagtagatagaaatgagaaaattggccaaggccatcataaagacttagaatgcttatgctaaactatgtaacagtagtgtatgtattgtctgatatagttctcagttataggatctttgttctggggcacacaggaaggtagtgaaagctagtatgggtagtaaaaagagcgttggattaagagtcagaagagctggggccagtttcttcttcttttttttttttttttttttttttatgtgacagtttctcactctcttgcccaggctggagtgcagtggcatgatcactgctcgctgcagcctggacctcgtgggctcaggtgatcctcccacctcagtgtctgcagtagctaggactacaggcttgtaccactatgcctggctaatttttgtatttttttgtagagatggagtttcactatgttgcccaggctggtctggaactcctgggctcaagggatctgcttacctcggcctcctaaagtgctagatttacaggtgtgagccactgtgcccaacgcaatttcttcatttctaatacagtgataataatcttatgaaatatcagaatgagataatacttataaaagtacattgtaaactgtaaaatgccatatgtatttaggtagttgttaataggtttatatctggatatcttaaaaatgtattgccaacttcttgtcttaatgcagcacagggaatataatttaacttttattaatggttcaaagtcattattttgattatttatcataatatggagtaaattgataccttagagggtttatttcattctcagaattctctcaaactgttttgtagctgtcattgattgattgtttttctgtcttcctcctctggtgacctcagaggctattgaggtttatagtatttatgactatttactaagtggctccagaccactgccatattttagttgatttttgtttctgcaacttttttggctatcagttttttattttgctgccttttcccttcctaatatgttagtatctaagtatctgggcagagttaaagtctacaaggaaaaaaacctcacattttaaggtttgcttaagtaaatagagaagcagttatttctgcttctgtcaaattaaatggaaaaggcttaaaagtagcttttttttttttttttttttttttttttgagatgaagtctcactctgttgcttaagccggagtgcagtggcgcaatctcggctcactgcagcctccacctcctgggttcaagcaattctcctgcctcagcctccctaatagctgggattacaggtgtctgccaccatgcctggctaacttttgtatttttagtagagatgggaccaggatggtctttatctcctgacctcgtgatccatccgcttcggcctcccgaagtactgggattacaggtgtgagccactgcgcccagccaaaagtagcttctaagtacaaaatggttgttctacatagttgtggatatggttcctggttgtttacccctattcagataaataggatattattaaatgtatttacaactaacatttagttttctttaatgctcagaaatcatatttgtatttcaggttcttttttatcttggccagtatattatgactaaacgattatatgatgagaagcaacaacatattgtatattgttcaaatgatcttctaggagatttgtttggcgtgccaagcttctctgtgaaagagcacaggtaattcttcagtttagtccattgtaaaaagccatctgggctaacatttcagttcacctctaccctcattcacttttgtcagagaaaaactgttgaaacatattaaagacatgctgaaacttaattttttagctctgcggcatattatttgagaacctgagctctggcatcttataaaccagtgtttgaaacctagcccaatcatttactagttttgtgactagataaattaacctttttaaacctgcttccccatttataaaatagggataattaaatacttcatgtggaggttaaagctcttgaagagagacgttgtataaaaaagcatagttttgggcacatacaaagcattcaagtattagctgtagctattataactttttattccagaaacagtataccaccacgtggtaaaggcttacatttgagccttagttattttggagatcattttcattgtcacctatcattatggcacttaaccagcagaatttaacccaggtaatatttctagaaataggcctggtgcggtggctcacacctgtaatcccagcactttgagaggccaaggcgggtggatcacctgaggttgggagttggagaccagcctgaccaacatggagaaaccctgtctctactaaaaatacaaaattagctgggtgtggtggtgcatgcctgtaattccagctactcgggaggctgaggcagtagaatcacttgaaccaggcaggtggaggttgtggttgaggtgagccgagattgcgccactgcactccagcctgggcaacgagcaaaactgcatctgaaaaaaaaatttttttaatatatatttttctaaaattattcttttttttgtttgtttgttttgagagggagtcttgctctatggcccaggctggagtgcagtggcatgatcttggctcactgcaacctccgtctcctgggttcaagtgattctcctgcctcggcttcccgagtagctgggattacaggtgcctgctgccatgcctaatttttgtatttttagtagagacagggtttcacgatgttgaccaggctggtcttgagctcctaaccttcggtaatccacctgccatggcctcccaaagtgctgggattacagatgtgagcaaccacacccggcctacatttggaattctttgtcacatttggtttagcacaggcaatccgtgttgagccttagcattcattacattaataaatggaatgaatacgttcacctgagacaattaactagcttctgctagtatttaatgctcaatagtatagctgaaaagatgataattaaatgggattttattttattaaaaaacataacttcctcagctgagcaagggattttataactttaaaacaaccttattattgtaaacatagtatatattattattgaacattaggagatgacagaaaactaagaaaagtaaaggaaaaaaaaggactgtagtttgttaacaaaaggtatttttaccagtcatttgtgtattatgtgcaactgtgtgttttaacctagttatgaatatagtactatatttaaatttcatctagcttcttaatttgtattataatttgtatattatatattataatatacatataatataattatatatattacaaatatatgtataattattattttttattgatgagtcacttctgtttaatatccatatatgttgtcattttatacgtggccttggtatatatggtttaattttataaattttaaaaataactatattggtatattggtgatttctttacctattgaatattgaatcttctattttttttcttttttttttgagatgaagtcttgctctgttgcccaggctgcaacctctgcctcctgggttcaagcgattctcttgcctcagcctcctgagtagctgggattacaggtgcacactactatgagcagctaattttttgtatttttagtagagatggggttttgccatgttggccaggctggtctcgaactcctgacttcaagtgatctgcctgtcttggcctcccaaagtgctgggattacagacgtgagccactgtgcctggtctgaatattgaatcttcggataatgtttggaagtatgatttccttggacttgaattctaaatgttgagagataagaaataggagaaattactgacttgaaaaggatatgaattaaaaatattgtgggtttaggttgctgtatccttattcccaaggatgaaaaaagatagttgggattcatatttcctcttaatattgagtgagaaacaatattttgtgacaaacactctcttaaatccttagtttaaaaacaaaaggaaaaatccattgtgacatcaacgaatactggggtaaatgaattatcctcctgttaggatataaacttcatgagggcatatacatttctgtttcattctttgttttcccccgtgtctggtacatagtaccagtgactggtacgtggtaggttttcagtctgtatttattgaatgaatgagtactgctttatctgttaataagtttcttttttttcttccctgagtcggagttttgctcttgttgcccaggctggagtgcaatggcgtgatcttggctcaccgcaacctctgcctcccgggtttaagtgattatcccgcctcagtctcctgagtagctgggattacaggcatgcgccaccatgcccagctaattttatatttttagtagagatggggtttctccatgttggtcaggctggtcttgagctccaggcctcgggtgatctgccggactcggccttccgaagtgctgggattacaggtgtctgtgagccactgcgcccggcctctgttaatacgttttaagatcaagaaaggaagttgaagcttgatgaaagtcaagattataatcaaattcctatttaatggattttgcgtaactcaatagtttttttggcagtttgtatttaatggattttgcataactcaatgcttttttttggcagtttgctactaagcacagagctaaaaacattcctgtttgaaaataagtatgttcaacctcttcctgcttgcatactcattttttgggggtcttctggtaaagtccaaacaaagcacatttcaggaattggtagtgtgaaatctttcagctagagagactttagtaattattaaaagtagctgtacataatcattgtgctactaattattgtgcttttaagtgcctacaagcttgccaatgataaatttggttttgaatgtgtgcagtagttcatactaagtatgtatgtagaagtctggttagatccagcttaatacaaatttttattctaaaatgtacatctcttgttattttttttttttctgtctacaaggaaaatatataccatgatctacaggaacttggtagtagtcaatcagcagggtaagttaattttgagcatcatggataaataccataaaaacgttttaaagacatttttgtttatgtgcatatgttttataattgtgattctctttaaaagttgctttaattaaatattgtaataaaagtatgataaatttattagaagtacatatgaactaaaaccacatactgaggttctaatgtaaagttaaatatcctgttagatcaatttagacttgggatatcagagttaggatttattttgaaaggtctgtaatttcaaaagctcctgtttaggagtgatctaccttgaaaatgtattgaaaggctttgggaaataatattgttacctaggtaggaccatgtgtaaggatgaaggatgagtctttttctttggttatagacaaaattttgtttaccaatttgtggaagtggaattttatgttcctacttccgtttcttaactggttatttttgggtcacatctctctttaataagctgataaaagcattgggttcttgttccagaaagatgcacatgtatatatacatgggtaagtcaataagtgttttacaacctactttccatgagaaaagccctgatttatgtgcttgctgacttccatagtataatactctcatttgaaggctaaaaacatggagttgggaagagatgtacacagtttgctttttttttttttttttttttgagaaggaatcttgctctgtcactcaggctggagtgtagtggcatgatttcgactcactgcaacctccgcctcccaggttcaagcaattcttctgcctcagcctcccgagtagatgggactacaggcgtatgccaccacgcccggctaatttttgtatttttagtagagagggggtttcagcatgttggccaggctggtctcgaactcctgaccttgtgatctgcctgcctcggccttccaaagtcctgggattacaggtatgagccactgcacccggtctcacagtttgcttttgagtgctgcttagagctgtctctaatacactacactgctcctaaagcccatcctcgaactacagttaagaaatgctcttaggccaggtgtgatggctcatgcctataattccagcactttaggaggctaaggcaggaggatcacttgagccgaggagttcaagaccagcctgggcagcatggcaaaatcctaactctgcaaaaactacaaaaatcagcttggtatagtggtgcatgcctgtagtcctagctactcaggaggctgaggcaggaggattttttgaggctgggaggtcaggactgtagtgaactgtgatcatgccatccagtccaggtgacagagcaagacctcatctcttaaaaaagacaaaaacaaaacaaaacaaaaaaacacctctcaggagcttgtttagttcctagaatgaattgaccactcccttgtacttcctctattccatattcagattttattgtaaaattgctttgttttacttgtgggtttttttgtttgtttttgagatgggctctcactctgtcaccctgcttgaagtgcagtggtaatcttggctcactgcatcctccacctccagggctcaaatgatcctccccctcagcctcccaagttgctgggactacagatgtgctccaccacgcctggctaatttttctgtatgtttggtagagacggtgttgctatgttgcccaggctagtcttgacctgagctcaagagatattctcacctcggcctcccaaagtttaggggttacaggcatgagccactgcgtctggctgttgcacttgtttatatttttgttacctgtgtcctattcaggtttgcattgtgcatcacacactatagtgttttattaatatggtatttaataaatgtgttgaattgaatacttattcttccaaagttaggatttaaagcccagaaaagtatctccattttatcccaaaataaaagtagttattaggctgatgatttggcattttattgttttaaagctctttttttttttgagctttagattgtatcctttttatttcctttttttttaattattatactttaagttttagggtacatgtgtacaatgtgcaggttggttacatatgtatacctgttgttttaaagctctttaagaaattgtgtgatagctaaatatacaattgtagtatttgtagtagtagtttgagttttctgaagtatgtaaccctgatgtattcattccttcatttgtttaaataaactttggcacattactagaaaaattgtattattgagatggaaacttacaaattacttatttgcagtctgagtttggtttagatatcagtagaattaacttcagaactcctattccatgttctcaactttgtcacttttttttttttgagatggagtctcactctgtcacccaggctggagtgcagtggtgcgatctcggatcactgcaacctctgcttcccgggtttaagtgattctccttcctcagcctcccgagtaggtgggattacaggtgcctgccaccacgtccggttaatttttgtatttttagtagagaaagggtttcaccatgttgaccaggctggtctcaaactcctgacctcaggtgatcctcccaccttggcctcccaaagtgctgggattacaagtgtgagccactgcacccacccagcctagggcttcctttttattacatcttttttgtagcatctgtttatactaatccaaaattcctggacaatataacctattatgtacaacttaagaaaattagtgtaatgccttacccatagtataaagagaaaattaatctatgataatgcataatttcaaaatgttaatgtccaggcatgagttcactgttaagatgaaaatgtttccaaggggggtagtaaagggtatttgatgataattgtctgtatatcccaactctgaaactttgacttttgagctcaaagtctgtatatccaactacaaatgaaacctatgtgcctgaataactcagtttgttatcttcccatccaatctgtttatctttctaaagtttctcttttagtgaatggtaccactcatttattcacccaagttggaatcttggaatcatcttaactcctttcttccttgccttctatatcaaataccaggtcttgttggtttttacctatttaatttctctggaatttgttttccatgccttagtttaggctttaatagtttttagtttgtattattgcaattgtctaatactggttttcctgcctctgccctctttttcttatgttttgctagagtgatttgtcactcttctgcttaaaattaccatttaggggttcattattgctctctggatgtaatattttctgtgagctagaaatcagtttcatttcttggacaaaaatcctttttaatggtgagtggctgcaacatcgcattaaggaagattctgaagtatctgcggggaagaatgcagtgataagggaatgacagcatgagtcctgctttggctagaccacaggatcctttacagtctgaacctgcctacattccagtaataatgaactgcttgtggtgtcctgcaacaggaactgttgttagtttgcttttggatactttttcacatggcgttttcttggtctggaatggcctttcctagccctattttcatattgtcctacaaaatatttcctgattctttgtttctcagacactccctgtccctaccaaaataatgactctcctgtctctctgctaatttatctaacagtcttttaatgtcttgattatactttactcttctacattaaagttgaattattttatttacatctgcaacatttagtatgaggatgccacctggaaaatacatgtttaatgtttattgaaaggttaaattgcataagggtttgtgttagactgatagcatatctactgagtagcgccccgccgccccccgcccaccaccaagtttctgatcctttttcttttctctcagaatcatcggactcaggtacatctgtgagtgagaacaggtgtcaccttgaaggtgggagtgatcaaaaggtaatctaagtaaatttctcattctaatgtaatattatttgcaaattggaaaggttatttacaacaagttagcttactggttatgttaagtttgttgtattttatttttttcctaaatgcttaggaccttgtacaagagcttcaggaagagaaaccttcatcttcacatttggtttctagaccatctacctcatctagaaggagagcaattagtgagacaggtatatatgaatatttatttgacgcattcacacagctttttgatattctttctctaatgaaattagtgcttttagacttaattaaattgttccctttttttggttgagatgaattaacctctgagtttttttcattcgtgattttatttgatttacaaattgcttatttagcaatatttttctggctgactacagcaggcacagtttactgtgccccactggagtttatagttagccaactctctgttaagatagtaggaggtggctggggtgtggtggctcacgcctggctcacgcctgtaatcccggcactttgggaggccgaggctggcggatcacgaggtcaggagttcgagaccagcctgaccaacgtggtgaaaccccatctctactaaaaaaaatacaaaaagtagctgggcctggtggcgcacacttgtaatccagctactcaggaggttgaggaaggagaatcacttcaacccgggaggtagaagttacagtgagccgaaattgcgccactgcactccagcctgggtaaccgtgtgagacttcgtctaaaaagaaagataataggagacaggcatataaactctattttcaccattattcttagtcaccttaacagttaaatttttaaattgttatttttaataaatggtagtacatacctatgagttttaaaacagaaagtaaatagcattttagaaatgaagagataagggccgggcgcagtggctcacgcctgtaatcccagcactttgggaggccgaggcgggtggatcatgaggtcaggagatcgagaccatcctgtctaacatggtgaaaccccatctctactaaaaatacaaaaaattagctggatgtggtggcgggtgcctgtagtcccagctactcgggaggctgaggcaggagaatggcatgaactggggaggcagagcttacagtgagccgagatcacgccactgcactccgcctgggcgacacagtgagactgtctaaaaaaaagagagagagagaaaatagttgacagagagaaaatagttgagaacagttagtagacgtagtagacgagaaggctgttgcctgaggaagtcgcagtaactaagaccgtatgattcagatgaaagagaatgtcagatcagtgaaacagaataaatgaacccagaccagaatctcgtacatgcgggcagaagacaggaagggcagaggtgtctagggcagaggtggaactagaacaaatggtagttacttggggaaaaggtgaagttagatctgtaccttatgccaaaatgaatttcaaatgagtttaaaagttaaatgaaaaatagaatacaacatatttgaaagatagtcactttaaatttgactgttaatatctgtattacataaaaagtcttcccaaatcaataaggaaaacattaaaacttcaaatagcaaaaagggcagacagttcacaaaaatttctcacagtaaatacgaatgactaataaatatggggagagggtgaattttggtgatttttagctttacagatagtaaaaaatgccaaaagggtgtccttttgatctatcaaattagtaaaaataaaatttttactcatccttactcatcagtgctaataacttgtgtattagcactgataaactgttggtctgtaaattggtaaaagtgggtaaaaattgattaaatttttcggattataaaaaagcttagatggcctggtgcggtggctcacacctgtaatcccagcactttggaaggccgaagcgggtggatctcttgaggttaagagttcgagaccaacctggccaacatggtgaaaccccatctctattaaaaatacaaaaattagccaggtgtggtggcaggcgcctgtaatcccagctacttgggaggctgaggcaggagaatcgcttgaacctgggatgtggaggttgcagtgaaccaaggtcgcaccactgcactccagcctggggtacagagtgagactccctcttaaaaaaaaaaaaaaaagaaaagaaaaaaaagtcttagagttcttaacattatcctagtaactccatttctagtaatctatcctaaggatgtaataaaaaattcaaagatttatatgtagagatactaattacagcattatttataattgcagcccggccaagatcacctttttaaaaatagggaacacaaacatgattaagaactcacgtgcagaacttgtgatctcgataaaacgtaaaaatcccggccaggtccagtggctcacgcctgtaatcccagcaccttgggaggccgaggagggaggatcacgaggtcaggagattgagaccatcctggctaacacggtgaaaccccgtctctactaaaaatacaaaaaaaattagccgggcacagtggtgggcacctgtagtcccagctattcaggaggctgaggcaggagaattgcttgaacccaggaggtggaggttgcagtgtgccgagattgtgccattatactccagcctgggggacaagagtgagactttgtctcaagaaaatgataaaaaaagtcctttcagaaatctgtgatactatctcattttaatttttgtcattctcatgggtgaaaaatgatatcatttcactttgcatttctttgatccctaggaggtaagagtttttttttctattactcaagtacatgactcaagatttttcatatgtttattagtcatttgtatttcttctgtgacttgctttttcctgtttccttaaaagaaaatacagtctatcttgatttggtaggactttgtataatatgtatactatgggtaatttttactatatatgttgcagatattatcttcgaatttgacctttgccttttaacttttgtttggtattttattttgtcatgtaaaccttgacatggtctaatcttgatagtctttttattgaggactttgcagtattatgaaatacttctccaccccagcattataagaatattttgttataggtacttgaatggttttgttctttatatttagatctttaatccacctggaattcatttttatgtctagtataaggtagtattctcatttatgtctaacggatttgtctaacattctgacccattcagagataatttattatttaaaatgaaatggaaactttttactggttttgatttctgtttaaaatatagggtactgaagagccgggcttagtggcttaggcctgtaatcccagcactttgggaggctgaggcaggaggatcacttaaggccaggagtttgagaccagtgtggccaacatggtgaaaccctgtctctaccaaaaatacaaaaattatccaggcatggtggtgtgcacctttaatcccagctacttggaagctgaagtcacaagaatcacttgaacctgggaggcagaggttgcaatgagctgagaatgtaccactgcactccagcctgggtggtcgagtgtgactctgtctcaaaagaaaaagtgtagggtactgaagaaattgaaacattaagaataccatatgagtaaattaaacactttggctcttttcggaaaaaaacagatgagctcttatattttaaagtttggttttgacagaaaaaaattcctagattttttggttaataaaaactttattagatagattaaattgtgatgtatggagataaagttctgaaagaagaatagaaagctttttaaaaatagtattctcagcctaggcaacatggtgaaaccctgtctatgcaaaaaatacaaaatggtgcattcctatggtaccgttcctatggtaccagctactcgggaggctgaggttgaggtgggaggatcacttgagcccatgaggcagaggttgcagtgagccgagattgtgcctctgtactccagcctgggtgacagagcaagaccctttctcagacaataaataaataaacaaataaataaatacacacagatagtgttctgctgtaacagttggacagattcaataaaacagtgttaacttttgaactaattttattgaaactaagtttctgtacaaataggtactcaaaacagctcaattttctaaatcacagtacagcaatttattttttttccttacatatccagaagaaaattcagatgaattatctggtgaacgacaaagaaaacgccacaaatctgatagtatttccctttcctttgatgaaagcctggctctgtgtgtaataagggagatatgttgtgaaagaagcagtagcagtgaatctacagggacgccatcgaatccggtaatgttctcattttaagtaaggcaagactcttactgttcaaagtctagtcctggcagtcctaataaggatacggatagaatgtacatgtgtcttacgagattgatagaaaacacagtgctaaattttactttaaaataaaactactatattgatctccaccttcaacccaaggtattgtgagaaatgtggaaaatagtggagtaacaccggtattggtaaaattagtagtagtattagtaattatcaatgtcactgtatgtattagagaatatttgtggaccactgcaccaatagtacagtcaaataaattggagtatagagttgtttgagaatttgagagttacactttttaaaaaaggaacaaaaccaaaaatttggttcagttaaatattttagcattttaaggcaaatttgactatttagagtaaaaatatattttattacagccatcagcaaaaaagtcagcatagtctgaacttaacatttgccaaataggtctagacatcaggtaagttctatttacttatgctgtaaaatacaggtttatactgggctgggtgcggtggctcatgcctgtaatcagtactttcggaggctgaggcgggtggatcacctgaggtcaggagttcaagaccagcatggccaacaagatgaaaccatgtctttactgaaaatacaaaaattagccaggcgtggtggcgcatgcttgcagtcccagctacttgggggcctgaggcaggagaatcgctcgaacccaggagttggaggttgcagtgagctgagattgtgccactgcactctagcctgggtgacagagcgagactccatctcaaaaaaaaaaaaaaaaaatgcaggtttattattgcatggatgacgggagagtatcagtactttctcattactaatacagacttccaaaatattagtgagcagcatttcttaagagatgtcactgaaagaagtttggtaaaaaatttttttgttaacaagaatgcttgacaaatggaatattttgttttgtatgtctttaatcaagcttgtccaacccatggcctgtgggccatatgccaggatggctttgaatgtggcccaacacaaattcataaactttcttaaaatattatgatttttttttttacaattttttttctgctcatcagctattgttagtgtattttatgtgtggcccaagacaattcttccaatgtcgcccacggaaaccaaaggattggatacattttttggtaatatggcagtgtctcatggccattattctgggtattagtaatcattgtatagtactctagaagatgtaggaagtggaaccaattgtgatagtaatcctagtcttttacctattcttgttacttcctgtattatctttttttctcttccaaagcagtgattgtatgaacgcatacctgccctctagagttactgtacctaacggagctgttacttatgtagaccgctagatggcatgatgagctcctgctcagtctgagagcaggttcttcatttgtagatatttaagtttataccaaattccatacagttgagatggcactgcagatacagtggtagtcaaggtagatatggttcttgccttcattgggagatagatcattaatgacaaaaatgaaaacatttaataaatccagtggaaaaaataggctcttgagcggaaatatatgtgataaaattgaatccaattaaaacttgatgagtatccaacctacaagtttggttaaaaagagaattattataccctatttatttatttattgagattgagtctctctgtctcccaggctggagtgcagtggtgcaatcttggctcactgcaacctccacctccccggttcaggcgattctcatgtctcagcctcctgagtagctgggattacaggctcccatcaccacacctggctaatttttgtatttttagtagagatggggtttcactatgttggccaggctggtcttgagctcctgacctcaagtgatctgcctgccttggcctcccaaagtgttgggattacagatgtgagccacctgcccggacccctatttaatgtatagtttttgttaaagttatatcagaattctagctgaatgatatttagagtccttgttcctgctttgtacctgggacactgccttgttactgatatggctttgaggagtagaggaacaccaggttttttgttttgagttgaattagataaaacgacacggacacacgtggagtggttttaaggagcagagcgtttaataggcaagaagggagaaggcagaaggaagaagctcccccttacacagacagagggaggggggctctaaagctgaaagaggagaccttacattctgacaatactagccagttttatgtgacggctggagggggtggtgtcttatttgcatagggctcagaggattggtttgaccaggcatgtcatttagccctcaagaaaactggccctcccaccccagtcctttaatacacaaatgcaggatgccatgacattttacacacggggttatgtgggggcggccatgctgttaggtacctgatggagcaagggcaagaggacaacggtgggaatcgccatgttgggtggaccctcttgcatttgcatcttaaaggttgccagcctttaagagccagggcttttatgctagacaagaaatttttctggagctacgaaaaaccttccaaggaccacttttcctctccatttgcctaaaataatttcttaataactcgtgtggagtagaggggtatttctttttttctttttgttagtcctgtcctgcattctcttaaaaaatcctatctataaaaaatctcagccgggcgtggtggctcatgcctgtaatcccagcactttggaaggcccaggcgggcggatcacctgaggtcaggagttcaggaccagcctcgccaacatgttgtgaaaacccatctctactaaaaataccaaaaattagctgggcatagtggcgggcacctgtaatctagctactcaggaggctgagacaggagaatcgcttgaacccgggaggcggaggttgcagtgagctgagatcacgccattgcactgcagcctgggcaacgagaacgaaattccatctcaaacaacaacaacaaaatctcgtttttcaggttaagtccctagttgtgaaagcttttggtagggccagtttttttttcttcttcgttttaatttccctcatttgagaatgttgtagtcatcattgggtgtcatcattcaccagtttgtgaagggagttaaaggaaagtgcattcctctcccatcttttctttctttggggtttaataaattgtgggaaactaagactgtgttctagactgtacaccatgcagtttatattatgatcttctgtcatctttgcagcctcagattccatttttagctaagactggggttttaaataacttgtttaaggttcctacaactaattgtcacaattggaattcaaacaattctaggtatttttgactacaaagatctaagatctttgcagagcaagcctatctgatgcttaaaaaaatatatattttttaaatttttgagacagtctctcactccgttgcccaggcgggagtgcagcgcatgatcatggcttactgcaacctcaacctcctgggttcaagcaatccttcctcctcagccttgagagttagctgggactacaggtgtgcaccaccacacctggctaattttttttactttttttttttcagagatgagatcttggcctgttgcccaggctggtctcaaaccgctgggcttatgtgattctcctgctttggctcccagagtattgggattacaggcatgagccaccacctccagcctgatgctttttaaatatatagtatttaggtctggtgcagtggctcatgcttgtaatcccagcactttgggaggctgaggcgggcggatcacaaggtcaggagatcgagaccatcctggctaacacggcgaaaccccgtctctactaaaaatacaaaaaattagccgggcgtggtggcgggcacctatagtcccagccactggggaggctgaggcaggagaatggcgtgaacccaggaggtggagcttgcagtgagccgagatggtgccactgcactccagcctgggtgacagagcgagactctgtctccaaaaaaaaaaaaaaaaaaaaaaaatatatatatatatatatttatatttaaataatgtataaatatataatatataattataaatctattatatattaatgtatattatatattacattgttatatatatttatataattatatatttatataaatataaatatatatatttatataaatataaaaatataattatataaatataaaaatatatatttatgtaaatataaatgggcaggcacctgtatatattatatatattactatttatataaatataaatatatattttaaatatttattttatatattttaaaaatatatatagagagagataatttaatagtttctggggcattcttttgcgaacattagccaaaactttaaaaaccactcccaatattgcattttttcatggtattttttatagtatttttatagtatcctaggacaggagttggcaaactttctgtaaagagccacatagttaattatttgggctctgccgggccatggtttctgtcacagctactcagccccgctcttgtaatgcaggagcaactgtagacaacaagtcaacaaataggcatggctgtgttcaataaaactttatttataaaagtcgatgggtgatgggccacagtttgcagacccctaccgtagagtatgttttctgagatttaatgtttcttgtgatttacccccttattctaaaattagtgcactaaagactttagttagttgaagtatttggtttgttgggttactttgttagtgttaattgtatcctaacttgacttgtgattctaatctgattggtagtagagcccttgttaggaatttgagctgcaacttgatgaatgttgcttttactctccttcctaacattactctaaaaaagtcttttgatgtcagaggctgtaaaataatatactttgtttctgtttttaaaactgatacagatatggaaatcatttaatctaagctccttttctagatgaagtagctacagcctttagaagttaaatgatatgggctgggcgaggtggctcacaggtgtaatcccagcattttgggaggccgaggtggcggatcactagaggtcaggatttcgagaccagcccagccaacatgacgaaaccccgtctccactaaaaacataaaaattagccgggtgtggtagtggacacctgtaatctcagctacttgggaggctgaggcaggagaatagcttgaaccccggaggcggaggttgcagtgagctgagatcatgccactgcatttcatcttgggtgacagagcaagactcttgtctcaaaaaaaaaaagggccgggcatggtggctcacacctgtaatcctaacactttgggaggccaaggcggttgaattgcttgaggtcaggagttcaagaccagcctggccaacatggtgaagccctgcctctactaaaaatacaaaaattagccaggcatggtggcatgcgcctgtagtcccagctacttgggaggctgaggcaggagaattgcttgaacttgggaggtgtaggttgcagtgagctgagatcaggccactgcactccagcctgggtgatggagcaagattccatctcaaaataaataaaataagttaaatgatgttgtttaaggttaaattagctacttagtggcaagtgtagaataagccatatcccgacttctagactttttccaattgtagccttctgcttatatatgctcctacccttagccactgacagcaaatattattgccctgaaggtcttactaggttcttatacaatttattgaagtcctgaaacgaagaatcagatgagcagctacagaattttttttaattgtctaaaggctctttaaaagaaaatctcaaagtttattaaaaaacataagtatctatgactcgagacatttttctaagaaaaaaaacccataagtattacaagtgttgtgtcttgttacgtgtattctaccaatttggacatagaaagatgagtgacaggttttagctcaaagtatatataattcagatgagaaacatgcctgcaaaattatgttttgcataatttatgtgtgagactatataattcattattatacaagtagtaaggataattaaaggtggaagagccttttcagttatggtattgacaaaggcttagtcaaagaaggatgaataggattttgaaactgaaattattctagttagagggggaaagtgtggaagttgaaatgccaagattagttgaggaagcaatctagatctggcgggattatccatatttagtaagggaggaggggtgtctagttgaagacagacgaagatgttaatacagtcacactgtaggtactttcgatgccaagaggctttggtgtttttcctttatgcagtggggttttgaacagggaaaataatgtagtaataaccttgaaaccttaatctagtttcagtatgcaggatggatctgaggaggaaatgtgcgtggcaaccggctccgggatggctggctggggggcctagtcttctgcccgccgatctccctcgggaagtcccggatcagagcagcaggcccatcccccaactgttacaccctgctggcagcagcagaggcacagggatgagttaggaaacagatacagaggtcaagaggtgatgtttattaagttatatatttttttcttgttttaggatcttgatgctggtgtaagtgaacattcaggtgattggttggatcaggattcagtttcagatcagtttagtgtagaatttgaagttgaatctctcgactcagaagattatagccttagtgaagaaggacaagaactctcagatgaagatgatgaggtagtattttttttcccctctaattatattggaaaattattaaatattttctatgttcattgactttgagattgaaataatattattcagatttcacttgaaatctttacctcttgatttgtttaaactaacacattggtttgtggacttgaggatttcatagttctttatcatctgatttatattattatattactactaattgccaagaagtcaatagacctcaatgaacatgcttattataatggtctgttcacttttaaaaacatataattcaactactgttttaatattaacttactttctataaaagtaaaacatgcatacagttaaagtcaagtagtacccttagagatctgtttcccagaagtgactgcctttaacatttctagctatttccctattatttaatatctccatattagttatttatgaagtaaaaccacctagctgaatgttttgttttattcatcctaaacatcctttgtattgacttttaccattgtgggtaaggatttctctctcctccattttttccccctttacactcacttactctatttgatattgtctaaggctttctcatatattgtagtacatgatatttgtttaggacttattactaggaagccttctgattgaaggaaatagggcgatgaattgatgctaatgaatgtgttttattaggtatatcaagttactgtgtatcaggcaggggagagtgatacagattcatttgaagaagatcctgaaatttccttagctgtaagtatacatctacttttttaagaaataaaaatttcattaaggtcaagattaggagactatatctagcttctttctgaaatgaactgatttttataaagttaaaatgtttttgtaaagtctgaataatttaaagcatttttcttttatttgttgtgatgagacctgtagctataatttttatttttaggtgctggaatttgaacttttttttttttttttttaaacagggtcttacccttctcccaagctggagtgcagtggtgcaatctcagtgcactgcagcctccacctcccaggttcaagtgattctcgtgcctcagtctcctgagtagctggaattacaggcatgcaccactataccccactaatttttttatttttagtagagatggggtttcaccatgttggccaggctggtcatgaactcctgacctcaagtgatctgcccaccttggtctctcaaagtgctgggattacaagcatgagtcactgcccagctgaatttgtacattttgatgttattttggaaaatttcagtgtatctccagtatactcatcacccagctttaactattaccaacattttgccaaccttgtcaaacgtaaacttttttttttttcaattgagatagggtcctgccctgtcttccaggctggagtgcagtgatgtgatcatggctcactgcagcccccacctcccaggctcaagtgatcctcccacctcagcctcctgagtagctggaataacaggtgcatgccatcacaccccagctaatttttgtattttttgtagaaatgtcaccatgttgcccaggatggtcttgaactcctgggctcaagtgatccacctgcctcagtctcccaaagtgcaaggattacaggtgtgagccatcacacccagccaaatgtaaacatttttattactgatttgtattatagaatgtggtaggatttgccattaaagaaattaacacttaaatgtttacatctcatgcatacttcactgagttcctgaggtattataggtttttttaaaactattgtgctttagtttttgttcttaatattgcctttattatatttgaataggaaataaattccattttttctgagttatagacagttactaattattcaagtgcaaaaaaggatgaaaattcaagagtttccaaaatttttactgtattagaaaataaataactaattgaatcatttgatgtcaagttgagtaaaatattttagatacttttaattttttaaatctattttaagactcaaattattttagatattcatcttggaatttattggactttttgatgcacttttactcccatattgcaagacctttttctttggttttatgagctgtgaaaaacccccttctataacttgaaaaaagaagaatgaatagtctatctttattgctcctgtcttaacatcatttgtgaggcaatctcaaaatggttacggaaatacctcttacttaagagttttcacttgttaaatgtcctcaggcaagaaccatgcttcagctaaggcaagaagataggttatgtaaaaaggctggggatgtgggagagtttgttatccaaattgcatggtggaaaggtttgtgggataaaacgttgggaaaaggaagaagcattgagcagttacaaagatgagaacacaggaaaggatagacaggtaaaggaaaggatattacggttagtgaccaaggatgataggttttagcagcaatacttgctgtgaaaaatgttttagcatttctcttgtggatggagttagggaatactcagttaagccatggttttagagtacttctaaggtagttctagtcactggtggattaggaagtctttctcgaggaggcaggtttcatctagattgatgggatggactcttggaatagcgcctagggttgagcctttaagggagtggatataggctgcatgacagagtaaaagatcccatagacttgcttcaactaaaggaagcaactgcatttgtatcctgaaacagataactttataggtacatgattaatatcacatcacagttaatatatttttagtttagaatttttcaggatggtaagggtgaaaaaaatgggtgtacttactctactttaggagagactgttacatattgacctttaaaaatctgttttgtgtataattgagacatataacgtgatgttttgacacacatgtaaatagtgaaatgatcactacagtcaagcaaattaatgtaatccattatcttgaatagttaacctttcttgtgtgtatggttaaaatacctaaaatctattcttttagtaaatttccagtataccaatatataactaactatagtcctcatgctgtttacagtgactattttatataaaacatgaaacactgaatattgagccctatgatatactttaccttagacatagcaaagttgctagcattcctgtgactgagcagttaaagggttacagaaactgactgtgtgtcttatttcattgaaggactattggaaatgcacttcatgcaatgaaatgaatcccccccttccatcacattgcaacagatgttgggcccttcgtgagaattggcttcctgaagataaagggaaagataaaggggaaatctctgagaaagccaaactggaaaactcaacacaagctgaagagggctttgatgttcctgattgtaaaaaaactatagtgaatgattccagagagtcatgtgttgaggaaaatgatgataaaattacacaagcttcacaatcacaagaaagtgaagactattctcagccatcaacttctagtagcattatttatagcagccaagaagatgtgaaagagtttgaaagggaagaaacccaagacaaagaagagagtgtggaatctagtttgccccttaatgccattgaaccttgtgtgatttgtcaaggtcgacctaaaaatggttgcattgtccatggcaaaacaggacatcttatggcctgctttacatgtgcaaagaagctaaagaaaaggaataagccctgcccagtatgtagacaaccaattcaaatgattgtgctaacttatttcccctagttgacctgtctataagagaattatatatttctaactatataaccctaggaatttagacaacctgaaatttattcacatatatcaaagtgagaaaatgcctcaattcacatagatttcttctctttagtataattgacctactttggtagtggaatagtgaatacttactataatttgacttgaatatgtagctcatcctttacaccaactcctaattttaaataatttctactctgtcttaaatgagaagtacttggtttttttttttcttaaatatgtatatgacatttaaatgtaacttattattttttttgagaccgagtcttgctctgttacccaggctggagtgcagtggcgtgatcttggctcactgcaagctctgcctcccgggttcgcaccattctcctgcctcagcctcccaattagcttggcctacagtcatctgccaccacacctggctaattttttgtacttttagtagagacagggtttcaccgtgttagccaggatggtctcgatctcctgacctcgtgatccgcccacctcggcctcccaaagtgctgggattacaggcatgagccaccgcgtccggcctaaatgtcacttagtacctttgatataaagagaaaatgtgtgaaagatttagttttttgtttttttgtttgtttgtttgtttgtttgttttgagatgagtctctctgtcgcccaggctggagtgcagtgtcatgatctagcagtctccgcttcccgggttcaagccattctcctggctcagcctctggagcagctgggattacaggcatgcaccaccatgcccagctaatttttgtatttttagtagagatagggtttcaccatgttggccaggctggtcacgaactcctgacctcaagtgaggtcacccgcctcggcctcccgaagtgctgggattgcagatgtgagccaccatgtccagccaagaattagtatttaaattttagatactctttttttttttttttttttttttttttgagacagagtcttgctccatcacccatgctagagtgcagtggagtgatctcggctcactgcaacttccgccttctgggttcaagctattctcctgcctcagccttccaagtaactgggattacaggcatgtaccaccataccagctgatttttttgtatttttagtaaagacagggtttcaccatgttagccaggctgatcttgaactcctaaactcaagtgatctactcacctcagcctcccaaaatgctgggattacagatgtgaggcacctggcctcagatttttgatactcttaaaccttctgatccttagtttctctctccaaaatactctttctaggttaaaaaaaaaaaggctcttatatttggtgctatgtaaatgaaaatgttttttaggttttcttgatttaacaatagagacagggtctccctgtgttgcccaggctggtctcgaactcctgggctcaagagatcctcctgtcttggcctcgcaaagtgctaagtaggattacaggcgttagccaccacacccggctgtaaaaatgtacttattctccagcctcttttgtataaaccatagtaagggatgggagtaatgatgttatctgtgaaaatagccaccatttacccgtaagacaaaacttgttaaagcctcctgagtctaacctagattacatcaggccctttttcacacacaaaaaaatcctttatgggatttaatggaatctgttgtttccccctaagttgaaaaacaactctaagacactttaaagtaccttcttggcctgggttacatggttcccagcctaggtttcagacttttgcttaaggccagttttagaaacccgtgaattcagaaaagttaattcagaaatttgataaacagaattgttatttaaaaactaactggaaagattgttaagttctttctgaattattcagaaattatgcatcattttccttcaagaatgacagggtcagcatgtggaattccaagatacctcttgacttcctctcaagctccgtgtttggtcagtggaggcccatccgagctcagcactgagaagtgttagtttctttgggacccatctaccctgaccacatcatgatgttcatctgcagctgttgcaaggtgttcagattgtataaacataaatgtcacaaaaactttaaaagaagtgcaattctcaaaaggttaggtggactaaagcattctgtaaagcaactgctaataatgagcttacagtggatttgaatttgaaaaatatagtaacaagcctgtcaaatatctgcaagaactatggaataaaactactgatgcagtgaagacagttgaaaagatcaaacaaatgccaagctatatttataatgaacaaattcaagaaaaaggactacggaaagttcaggacatcaaagaagtcaggcaaaactcatcttgacccctgttgcaggcaaaggaacgcagctggaagaaaagatgatataacagttaacaggatgcagacatggcagaggtttcctaaaaatctcattatctataaccatttctatatttacatttgaaaatctcctttggagacttagaacctctaaattattgacttattttttatataaggtcactccgatgaaaggtgattacaaaatcatctacattgctgtctacaaaacagataatatggatgtttgatcgcatctcattgttaactctttactgatatgtttgtaaatacagaagtgaaatgtggacataaaatagttacgctatttggttaatggtactagacaacatgtaattaatgacattcaaaaatttatggctagtgatatatataaagtaaaattttctttgcagtaaaatatgccctttattatagaagggaggatataaggaaccaacagtttgtatgaaaatagctcaaataatatcttttattttgattttaatatttcttattttggtttattagtgtcttagaacaaaatggccttatataatgaagcctagttatgctggactgttttgatctcttttaattgttctgacagatagttggggatgagagccgaataaggtttgcctgaaataactgacactatataatttctgctttggcaaatactaagttctaacttgtcattcctggtagaacaagctttatttttcgagcctagcaatgatctagaagcagatgttatctcagtgccttttgcaatttgttgtgtgggtttttttttttttaaagccacacaataattttggaaaacaatgtatgggtagaacatgtgtctgttaattgcacacaaaaccacttttaatgggtacagagttaaatttgaaggaataagttctagctgaagtattatgaactccaaataatgctttgaggacctccaaaggtaaaagtactaatccctttggccatttattgagagagagagagagagagagtagggtgactatagttaatgtattgaatgttcttgctacaaataaatgatatttgagctgatgggtgtgctaattacactgatttgatcaatacccattgtatgtgaaacagtacatacaccatatttacaattatgtatttaacatttaaaatttctaatataagtatctctcaaactgtggattaacttcttgatttatatttaaatatgaatcttaagcaaaacagtgaaaataaccatcttgatttagtgtttttctcccatatgtgaattgtatatacttaggtgaagacaataaaatcaactgaactgtaagcttagaataggactgaggtaattctgcacagcaactttactaatggtacattgttgcttcaaaactctctctctctctctctgtctgtctcaataaatggccaaagggattagtagtttacctgtggaggtcctccaagcattatttggagttgataatacttcagctacaaccaagcagaatctcttttttttggaggtcctcgaagcattatttggagttgataatacttcagcttcaatttggagttgataatatttcagctagaacctagtagaatctgtttttttcctttggaggtcctcaaagcattattggagttcataatactgaagctagaaccaagcagaatctgtttttttctgaggagtatcggtagcataaatgtgattataaacatagtacacttgatatatggaggcagtgacagctatttttacaaaatttaaatctgcaaatggattcaacatgtttatgggttattaaaattgtctgatttcttaggttctttatagtacacgtgttgaaaataaatgattaagaattgtttcaagaatgcaattatttgatcttaaatttttatgagttgttaaaatagaaattatttgaatatcatatatttgggtaacaaaaggcacaagtctgaatgtgtttctttttctggaatggccatgcctgcccactttagaaatacaaatatcactgggcagcttgaagcagttgggagcctccaatgagagcaacttgagagaatgatgttgcaagttagtaggagtaagaaatgctgtgttctccctgtcttctcttaggtcacatggcagcctggcctaagtgatcgtgaatggtctataagggaggtagctgggacagggaggggagtttgggctagccaccgtaccacttgtcagcgtgaaaagtaagattgtaattgcctgtttagttttctgcctcatctttgaaagttccaccaagctgggaacctcttgattgtgaggcacaaatgtaagtacatcagaaaaaaacaaaaaaactggctttaaagcaggagcttgtgggcccctaagccagacggggactagcttttggcattatataattaagattttttaaatccttaataagggttttattttatttttatttattttttgagacggagtcttgctctgtggctcaggctggagtacagtggtgcaatcttggctcactgcaacctctgcctcctggctgtgttcaagtggttctgcttcagcctcccaagtagctggggttagagcaccctgtcaccacgccccgctaatttttgtatttctagcagagatgaagtttcactatgttggccaggctgggctcaaactcctgacctcaagtgatctgcccgccttggccccccaaagtgctgtgattacaggcgtgagccgccacgcccagcctaataagggttttaaagataattagtgtgtaggtctgtaggcttatgatggtaaccacaagttgttaatggcattgtgaaaagtttttagttgcgctttatgggtggatgctgaattacattttgatttgatacttataaaaagaaaaagtatttcttcagcttaaaaaattgtttaaaagtttgtgatcatattgtctaccatgtagccagctttcaattatatgtaagagggactttttgacatttacaaataatactttgaggtagatatctgaaagcaccagcacttggaaggtgttcagaagtaacaaattataaaatgagctaacaaacgaaaggcaaaataaaaccgtaaagcaagca

SEQ ID NO: 20 - DNA, 7783 bp, Homo sapiens
aacggctcctttctcttctcttagcagcacccagcttgcccacccatgctcaagatgggcgggatgccagcctgttacataaatgtgccaaaagcctggccatgcctggaaaatggaccaatccgcccgccaagaggttgggtctcgttccctagagagaaggaagtttcctctccttgaagtgagagctagaatcgcactttctgtcaagctgagagaaagactcttttccagaggctaaaaggacaagaaaatctgatttgcttgcttctaactttgcgttttaaagggggaaggaggaaaggaaagagggggagggtggttctgcttagccccacccctccggctaccccaggtccagccgtccattccggtggaggcagaggcagtcctggggctctggggctcgggctttgtcaccgggacccgcaggagccagaaccactcggcgccgcctggtgcatgggaggggagccgggccaggagtaagtaactcatacgggcgccggggacccgggtcgggctgggggcttccaactcagagggagtgtgatttgcctgatcctcttcggcgttgtcctgctctgccgcatccagccctgtaccgccatcccacttcccgccgttcccatctgtgttccgggtgggatcggtctggaggcggccgaggacttcccaggcaggagctcggggcggaggccgggtccgcggcagaccagggcagcgaggcgctggccggcagggggcgctgcggtgccagcctgaggctgggctgctccgcgaggatacagcggcccctgccctgtcctgtcctgccctgccctgtcctgtcctgccctgccctgccctgtcctgtcctgccctgccctgccctgtgtcctcagacaatatgttagccgtgcactttgacaagccgggaggaccggaaaacctctacgtgaaggaggtggccaagccgagcccgggggagggtgaagtcctcctgaaggtggcggccagcgccctgaaccgggcggacttaatgcaggtacccagggctcagccgcgccggggcgggcgggactccagagcctccctctcaacagcactcagtggacattgaccagacgtgaaggcgtgcaccgctccacacccagcaggcagctgcgctggggcttcccagacctaaacccagggcgccctctttgttcatgcaaaacaagggggagtacttgtaaagcagaatccaccccgagctaatccatagccactcaggcctccagatgagggcggaactaacattgttgtggggtgtgggcacacttactccccaggctaccctgttcgccatcttaattctacagataaggaaactgaagttcagtgaggttaagcagtacgcccaaggccgtgacactagcaatcagaagagctgggattcaagctgaggtctttgtggctccaaagacctcttaactctttccactctgagagtcccggagctgacagcgggcagtactcttaagaattttcttctgtctgatgctgatttactgacctgggccagctgcattggttggggtcattcagaaatgtgcatcagaatcccccggggcacaaaagaaacgtgatgggggcccaggcacgtgtactttgaaatactcctcaggtggttctgccacacactcctggttaagtccctctgctctacagcttctgaggactggggtgagtgagcacagagcctagcgcttgatgcatgggaaccatcgtcaaggttcctaatcccactactattatttcccgtctgggactcagtttctccatctgtaaagcaaggggttcagatgaggtaaatagctaaggactctaccagttataacatccactgatcatgtgacctccagtttatttgcataaaactaatggcctctcctttttcttctccttacttacaaaaacctgacttcattctgaaatttatttttgaaaaaaaaaagaggggatcttggaaggggggccaggggtagtgacatacagatttctgatcatgctcaccacttagtgcacttctttctctgcagagacaaggccagtatgacccacctccaggagccagcaacattttgggacttgaggcatctggacatgtggcagagctggggcctggctgccagggacactggaagatcggggacacagccatggctctgctccccggtgggggccaggctcagtacgtcactgtccccgaagggctcctcatgcctatcccagagggattgaccctgacccaggctgcagccatcccagaggcctggctcaccgccttccagctgttacatcttgtgggtgaggaggcctccatgctcactccacacaatgtggctcaacaccttcataaatcagccaacttgaatcccagcaatcccccagggcactcccaggccttcctgtatcacctgtattgtcaggtcctcaaaccatgttagaagggtttaatgttgaggctgagaatcatggttagcagatagagggtctggataacactagataggaggcctatgtacatgttaacaccggacgcccagcagaagtcccagcttcttagaatcatactgagcttctctctggggtcccagtgcaacagaagggaccaattgactcatttattcctcctcaatcccacagaggccagtcaagaactcacataagggaatctaagaagacttggtccttgcctttagacagtgcagtgtaactgagaaggcaacatatgcataagatcagatgaccatagagtttagaaggatagccctgtctatgatagaagctggagatgagtaaagatggtgtggacaagggtagtcagaaggctttttggaaggctttgaagggtgggtagacttgtgaaggacataaggcatgccaaggtggcctaagaaagagtatcagccaggcaaggtggctcacacctataatcgtagcactttggaagacagatcacgagcccaggagttcaagatcagcctgggcaacatggcgaaaccctgtttctacaaaaaatacaaaaattaaccaggcatgatggtgcatgcctgttgtctcagttactcaggaggctgagttgggaggatcacctgagcccaggaaggtcaaggctgcagtgagccatgatcatgccactgcactccagcctgggcagtagagtgagactctgtctcaaagaaaaagaaagagtaggctgggcgtggtggctcacgcctgtaatcccagcactttgggcggctgaggtgggtggatcatgaggtcaggagatcgagaccatcctggctaacacggtgaaacttcatctctactaaaaatacaaaaaattagctgggcgtggtggtgggcacctgtagtcccagctactcaggaagctgaggcaagagaatggcatgaacgcagggggggtggggcagagcttgcagtgagccaagattgcgccactgcactccagcctgggtgacagagtgagactccgtctcaaaaaaaaaaaaaaaacagtatcaaggtgagaccagccactgcactcagtagtgaaggatgactattgtgatttgtgaaaaatgaggctggagccagatcatggtgtccttgaatatcaagctgtctggactcaatgcaaaagccaatggagaagcactttacattttgaggaggaagtaacataatgcaagtgccatcttaggaagaggagcctggtggctgtgtgttgcctggatcaggaagaccagctggaggccagtttcagactctagaaggactggctttcggtggtgaccatgggaatggtagttgttcttacttattcaggtgtaggtcagagatgtgcattttggtgttataggtaaaatagagattatggatgtggctgcttatagccctgtttcaaaaggctgttttccactttagccagaggcaataagacagaaaaggtcgtcaatatgctctttttctttctccaaagaacaagatggtttgtatttgagtcacagcgtcccacccccaccagcccacccccaccccaccaaataaaaaaggaaaagcaaaagattgatttggcatttggtgcaacggccaggtgatcttgatagaatatgcctgtgtggggaatgtgtagcagttgcaaagtaaagagaaccctgtactttctgtcacaggaaatgttcaggctggagactatgtgctaatccatgcaggactgagtggtgtgggcacagctgctatccaactcacccggatggctggagctattcctctggtcacagctggctcccagaagaagcttcaaatggcagaaaagcttggagcagctgctggattcaattacaaaaaagaggatttctctgaagcaacgctgaaattcaccaaaggtaaacaactgcttctacagttcagcaggaatttaagagatgattaaataaaagccccaccagtctcaaagttgccagtgctgtgtatcagtcttacctctgctaagtgcacaacagctgccctggccaaattctagtactatggtatttgaccactggagacaggcagtcatatttaaatctaagatggtttccatgtgcattcttgcaagagataagattcatccacactttagaccatgcagacttggtctggaattatccagcaccttttcttcccaaccagccattccacacttagttaacaggaggcttggaggcagagaccagtttggagccagccatggtagggttgggtggtagcaccctaaatgagtaagtagatgtgcacacctctgtattccaaagccagacgtgtctatttttggctcatccctttccgtttctctttcttttttttttttgagatggagtctcactctgtcactgaggatggcgtgcagtggcttgatctcggctcgctgcaacctccgcctcccaggttcaagtgattctccagccttagcctcctgagtagctgagatcacaggcgcaccaccacgcccagctaatttttgtatttttagtagagacgggctttcactatgttggccaggctggtctcgaactcctgacctcaggtgatccacctgcctcagcctcccaaagtactgggattacaggcatgagccaccatgcctggcctccattttttatgtgagtagaaaaggagagatgaaaccaaagctagaaagcctatgattccaataacctagtgcggacacttcctaacttctatgtgaacaactagcctaggttgggcctcctgtattctgttctcaatcgtgcctgggtgtcagtgggactgtacttattttggcatgacaggagacgctaggtcatggtgccccatttccctcttgctgtagctaggcctcataaatggtgaacttcatacatgctatcatagagttctgctatctaaactccatttacaacagttcttcaagcagtgtttctaattccaacctatagatttaccacttgcatctgtatttatatccataatccccaaatataccatggtatcttatttagcaccaagctgactagcatcacaaatctgtttcctatggaaggtgctggagttaatcttattctagactgcataggcggatcctactgggagaagaacgtcaactgcctggctcttgatggtcgatgggttctctatggtctgatgggaggaggtgacatcaatgggcccctgttttcaaagctactttttaagcgaggaagtctgatcaccagtttgctgaggtctagggacaataaggtgagtgatgaatgaaaagaaaacatgtgatttaacccagaaaagtgtggttcatttacattaccccgagaaaggaagctctaccttagattacggaggttagtttctatgaagaaacctccccctctgaagataaagagggaacccgatttcagagaactgattcagattggttgatagaagcttcagtatcatgaaaagaagtgtagctgatacttcacaggttatctgaacattctaacagaatgaagaaagcactgactatattaggaagtatttcgagtagttccaagactttgttttcaaaggcagaattcatctcagtgtgctagaaagtctcttaggtgagtaaaaaaataagtaagccttggccttcaacagattataggttccatgccgggcacagtggcacttgcttgtagtcccagctacttggaaggctgaggcagaggattgcttgagtccaggagtttcaaggctgcagtgagctatgattgcacctgtgcatagccactgtaccccagcctgagcaacatagcaaaacctcatctcaaaaaaaaaaagattatatgctcctgaaatattccatctggcagtctagcaggtaccacctttgggaatgtttccaccatagggttttgcaccagctgagggacaggagagcttaagcatccttttttcactaagcctatatgagtcctatctgtggctgcctcctgggtaaagacactttatttaaaaacaattcttaggctgtcagtgacactaacattttactccaggcttcagtctttatctggtacagaacagaagttacacatttggaggtacaagggagccagagatcacctgtaacccccctttagctcctatgtggtctcttcagctggctctagaaaccaaattgataccagcagattgacaggagaaaagcatgtactttttttttttttttttttttttatggagacagggtcttactctgtcacccaggctggagtgcaatggcacaatcagcctcctgggtagctaagactgaaggcataccaccatgcctggcttgtattttttatagagacaggttttcaccatgttgcccaggctgatctcaaactcccaggctcaagtgattcggccaaagtaagatgcttttgtaatttttagacaaagaacaataaatttgagaagaaataagacaaaatctggctagggatagtaaatttctagggaagtcactaggagatatatgggggtggggggtgtaaaactagtggaagataagggttacttccttaagtgtatttattcagttccattgcagccccgtttccagtctctggtgataagggctttttgccctagtatggggagggtacccctctcagaggaatctttatgacttgctacatgcaagaagagacaggtcagctagccttttctgaaactacaatttctccaatgctttcacctcaaaattaacaatatacctatcggacatattctgagatggcacatgactccttcaagggtatttcacacacatgctaggaagtgaggggttaagtgtccctgtgtgctttttcagatacgtggcttcagagagagcaagaaggctgaggaggatgaggagggcagggtgaggctctctccccaggctgatgatctcctttcccttgtcttagtacaagcaaatgctggtgaatgctttcacggagcaaattctgcctcacttctccacggagggcccccaacgtctgctgccggttctggacagaatctacccagtgaccgaaatccaggaggcccataagtacatggaggccaacaagaacataggcaagatcgtcctggaactgccccagtgaaggaggatggggcaggacaggacgcggccaccccaggcctttccagagcaaacctggagaagattcacaatagacaggccaagaaacccggtgcttcctccagagccgtttaaagctgatatgaggaaataaagagtgaactggaa

SEQ ID NO: 21 - DNA, 51343 bp, Homo sapiens
atgccgccgctcctggcgcccctgctctgcctggcgctgctgcccgcgctcgccgcacgaggtaggcgcccacccacccgcgagcccccactttccgcgccctttggaaactttggcggcgcccggcgcgcgcgccccacggctgggagcgggcggcggggaggccagcatggagagggaaaagcgggcggcccggggcgtggggttctggagtcccgggatcagggaggaccgaccttccccctcgatccccccgtggaggcggactcgcgccgcccgtgcctggagccgagttaggaggccggtgtggggtgctggggccccggaggccctactccgggcccgcccttcacccgccgcgcgtggggcttgccgccggtcggccgggcgggcgggctgcctactatttttcgatttgaatagagtcggttttggtttcctgttgcttctccgggccatttatcttctttcttcttcgcctctggcccacgccggggcggatgttggggcgcggagtgtgggctctgcggcgccgcgttcgccttcactgacccgcgcggccgggctgggtccccgggctcccggtcgccccgcccgccggtgccccccagcccggctctcagtttgggggaggggttgcgtaagaagccgccgcgcccggggggactgaactttccttttgctttgcggagttgaagtttggaaagcttgggggcggagagcgggacgcgggtggggggctcttacatttctccccgccgcacagcgagcggggtctctggggaatcgagtgattaatccactctttctccgagagttggaggcgagaattatctgtcctcttccagaaagtgcggctctgtgtcacacccccctcccccgtttctcagccccggtaagatggggagggaggggcttgagtaattgatcccttctcgagatggggtcgaattccttccgaatgggggaccttcatccccctcctgtgggtgtatgggggctgccctggagatgcgcgcccgcggaggcaggtattgggtgtcggcggaggcggggccgcgtccccagggtgctgtcccggtgcccctggaggcggccccgactccacaatgggccgctctgattctgaggcggaggccggcgctttgttggcgggcggggtagcgggcgagcagctgtcgcattttcccacgggcgggagctgagtgtggccaccccccctccccccgtccagctctgcccccttgcagaacgggtttgaacagaggcaatctcggcggctggatggggggccctgccctgccagactcctcagtgagcctccagggtggggggcaacgctttggagagtagcccactttgtctctgcttttcccccactgcgtccaggcggcacatcaggccaccccaccctgcttcaagcaggacgtgttccctgctgctccccttccccccatttctgactacagaactctgggcagaatgttgacgcccctttggtttcatggaggggcttcctgcggacccgtgccccagcaacccatgatactgagcagagtgcgtccggggtagggggcggacgatgccccttggctgggtgcaggtccccgcccccagggtaaccagggccttcggtggtggtggtgcgggtgagactgacctctcttctcctgcccctgcctaggcccgcgatgctcccagcccggtgagacctgcctgaatggcgggaagtgtgaagcggccaatggcacggaggcctgcgtgtgagtaccacccctgcgggacctgttgctttgtcgagggcagagcccctgccttctgcagccgcgcaggggacagaacactaggccattgtcttctggagatggcccagagtctgggcacggtcacgtgctgacttttattggacaaagtctggcaattacttaatcaccagcaattatgctgcgtgtggagctggtctggctgctgagggcttgggcactcctccgtgggccacctcaggctccggggtcactaagtgggagtcccagtaccccaattcttctttaagtccccaagaaacagttgatctgccaggggaagctctggaccatttactgagaggcccagcccccaccaccctgccaacttggggcgcctcctctgggcgggtgatgcctcctgggcacaggtgatgcctcctctcgggggtgatgcctcctaggtgggtggtgatgcctcttgggctggtagtgatgcctcctctggcacaggtgatgccacctcctgggcgggtgatgcctcctctgggtgcgtgatgcctcctgggctggcggcaatgcctcctctgggcacaggtgatgccacctcctgggcgggtgatgcctcctctgggtgcgtgatgcctcctctgggcacgggtgatgccacctcctgggtgggtgatgcctcctctgggtggtgatacctcctctaggtgggtgatgcctcctctgggtggtgatacctcctctaggcgggtgatgcctcctctaggcacaggtgatacttcctgggcaggtgatgccacctccgggtgggtgatgcctcttcaaaggaaattgactcttcaaaatcggacccgcctttgggctctctgtttgccccagctccctcttcccggcctcaggctggggctggggaagagaaggtggaactcatgttttggcgtggggtgtggggtaattattgagtctggtttctgtcctggcatctgcaaactctgacctcaaaatcccgtggcccttctggtctgccagcctcagatgtaaaatgggcactgagggggccgggaagtcgtgcggaaccgctccctcctgcctgcctgtgagtgcccatcagccgtggggaactgttctgctgtggccgatgcccttcaacttgagtccatccctgatgagaataatgaggaggtgtttggtgtctggaaaaagagttccctccgccccccaggagctacagatgaagaaatggctccccagccagtctgcgcgccctcattccaactgcagaaggtcccattcccttgacaaccccagcccggctcctgcctgtgccgactgcccagcctgtgggcagcaggccccctccctccccggcccccaccctccccaaactgaagccaattaagcaggtctgtgagcagtttaatggacaaagccgattgtgtctttgtcagacactaatgaatgcgcactacttttttttttttttttttttttgctttttggggcccccttctccctctgcagaagccgcacggacgcttgatgccctaaatcttgtttcctttcattcagagaccgacagctgggatccaggggaagtgcagcagctattgttgggggaggcggattaatgccgtgtgattaattatgcgtggcttcccagaatgtataacccccttccccgccactgcgctcccggctcggactttgcctctcacccattcggggctctgggagaagcttcttgctcctgcagaggactttgggagggtgggaggaacaccgtgctgggaaaattgggggcctgttgcttcttctcagtggcaccagggagtaggcacagcctggcccacaggggtctgggactgaggtctccctgggccagagcgctgtgctttggggtacagattgctgcagctccctggtgtctgggttaaaaccctgccacagggccgcaaaacactggtgtcatgggcccactttcccattccccaaacctgggatcccggtgagctgtttccagcccaaggcaggccgccgaccatggctttggtgcctggccttgtcccctttgctggggcctggcgccccctccttcttggcgggaagcctgcttcagtttggcctgacaggcagccgagctcagcccacagagaccccattgtgcacaccccacaagtccaacgagaagatgggacggaagcgcgtcctcaggctcctgcttctgggccgcagagttggaggccagggccacagccgagcccggcttgtggaggcacaggtcagggctcacacagcagtctgggggacattgcagccgcttcggagaaggccccgggctccctccctgggcttgagccccacccaacatacacccctcaggtgcctctgccttcccgttcctgcccatccttctcagaaggcccaggaggtctgtccaggagttagccagggcacctgcaggaggcctggctcccccagcaaggggagaaacccacactgtttctcgaaagagtctggggtgcaggctcttggagccctgccagcctgagtgggaatcctggccccgtggtatccagctgtgaccccggaaagagctttggcttttggtgccatttgctgcctccgctgtagaaggggcatggtcatgatgggcgtcacagtgcctggctcactagtactgggtgaatcatttctttccatcccaaagagaaggaaccttcaccggaagctgccaatcaggtggttgcagggcccgggattggaaaaagtggttttgttggtgcaaaatgccttcccaggaggtcagagtgtcgccgtggcctggtcagccagtggccaggtagaaagcacctggcagcacatgctggtgggcggaggatggttggtctctgggcagctgctgtgcgaggtgtggccgtggtggctgtggtcggagatggtggccttctgagcaggcccagggggtcactgtggcccttggctcttctctagccccctcatcagctccgtcagtgtgagcaaggggtactgaagagggctccaccttttttctctttgttttgaggagagctgggaagagctgcagggaccctatctgtctgggtgagactacgtccttggtctgaaacgctctcccagggctgcctgcgtctgggctgggcgttgaggcagggggcagctaagatgttggctgctgacggcagagtcagaatggcacggggcgtcttccaggagctgggagaaatgggggtaggctgtcacacccagcacctccaggaggatgtccagctgcctgctgggtggtgcgctttagctttggacaacctcgtgtctgaggcctggcctggccactagctctgtgaccttgggtcatcaggtcatgcaagcctcagtttccccagcatgtcagccgggctgatacacgctggatctcttggtggtgtgtgaggattgcatgagaaccgtgtggagagggcacctggtcagcgctcctttcttccccgccttctccccgttggctgacagtgctggtttccagagcctccttcctgaatgtttaattgattgacgagtgaattcagagaatcctaaaggtgctgcctggtgggctgggcctggcactgcctggggagggacttgccggctctggggaagtccatctcccaggatggctccagctccggggaagtccatctcccagggtggctccagttcacagacacgtttgagcgcctgctgtgtgctgcgttctgctccaggccaggcccccggtggggacagggcagacatggcccctgctcctgtggagttcacttcccagcaaggcgtgagagaggcacctagctcacatgtgggacatgttgggggtgtgccggcccggtggtggcctggcatagctcccggcagccccgtaaagctgtctggatcaggcaccgataagtgagaagaagagacccagagaagtcgccatcagccccagggtcacacagcagtggcagaattcctactagccctgcccctctccttctcccaagcgaatgtccctaaacacagccccagccagcctgagctgccccgtcatttcccgactacaagcggactgggggcgtggcttccccttaaaagaagaggaaggaggctcaggcgggaagtgacttggccctgcagccggcctgggaggctggggagggacggggtagctcctgtcacccggtctggctctttccattgagtcacctgcctcgtcttgggcgtggccaggggaggaacaggttgattctcctcctcatgctgagctgagcggaaaggcctgtgacaggacctcctgtttatgcagaacctggtcttcaagggcgccagggttagaaaaacatgtttaaaaacatgcagcatccgaggtgggcagatcacctgaggtcaggagttcaagaccagcctggccaacatggcgaaacccccgtctctactaaaaatacaaaaattacccaggcgcagtggcgtgtgcctgtaatcccagctacttgggaagctgaggcaggaggatcctttgaacccaggagacggaggctgcagtgagctgagatcgtgccactgcactccagcctgggtgacaaagtgagactctgtctcaaaaaaacaaaaaacaacaaaaaaaaccccacacagtgtcaaatagaaagtctcacctactcagactggggagacatcaggaacaggaaggcctggggcggagactggggtgggagcctggagtgctctgaaggaagctggctccttggggcaggccctgcctctgaacagcagccaacatgttttccattgaaaagaataataatagaaaaagagagagggagaaagaaaacagcaaccctggcaggaagagggtagggcagggcagacagtgcaccaggggaagtgcttccacagggcagagctgggtgcggggacccccagatgcgggcggcaaactggagaccccacaggagccgggactggcttcattcctcattccctgcacctgtgatgggcagcagcggccaccggtgcccactgggcagttccaggccgggccgagggactgcacccttttgctgtggggaggggacctttcctgtttcatgtctcgtctataaatagtgaaaggatgtggctttgcagaatcgattgggcgtctagcttgccttcctcaataatgcagcgatgacagctccacactcaggacgccgctgttacccagcctcgtaaaagccctggcagacggccgcccaccctccaggtgtgccagtgcagttttcatccccagcgcacaggtgggaaagctgtggctgcgagggcgtggggatctgaggcaggctggcgtcagctttcaccttcatgtgcaggcatatccagaactttccggatctttccccgggctgaggaggaaataccagcagctttaacgagcggctggctttggggcatcacacctgtgggccgggctgcgtttgacggcctcgagtttcccaggcagcgctggcgctttctcctgtggggcccggagctccgaggggctgtgaagcagggctggctctgatttgctgtgctccccacactgtcccctccctgggcctcagtttccccatctgtatgtgattccccttccaactacagccagcgggaccctggggcgggctgaaggcgtggtggtggctgtgggccctgcggcgaggcctgcgctgggctcggtggtcgccccagctggggaaggggcagtggctgcaggggtgggagggtggagggaagcccttttccaaagttgcctggttgggttctccttgtggccctgccccaccccaccctgctccctgggagcaaagggagctaaggactggtttggggatggatatgtatatggagggattctgggtgatgacttattcatattacaaaatttgcctttttttgtttgttttttgagatggagtcttgctttgtcacccagactggattagagtgacgcagtcttggctcactgtaacctctgcctcccagattcacgcgatgctcctgagtagctgggactacaggcacataccaccactcccagctaatttttgtattcttagtaggggcagggtttcaccatattggtcaggctggtctcaaactcctaacctcaggtgatccacctgccttggcctctcaaagtgctgggattacaggcgtgagccactgtgcatggccacttttttgttttttgagatggggtctcaccctgtcacacaggctggagtgaagtggtgggatcacggctgactgcagcctcaaactcctgggctcaagcgatcctcctgcctccgcctccagagtagctgggaccacaggtgtgcaccaccatgcctagctaattttaaatttttttgcagaagcggggtcttgctatgttgtccaggctgaaaatgtgacttttgaactaaagcatgctgttgcttgacatctagtccattcacaagttcattcaaccactatctagttccgggactttctcactgcacaaaacagaaactgtacccaaatactgtcactctgccctgactgccccagcccctggcaaccactaacccgctttctgcctctgaattcgcctcttctggacgttgcctatgaatggaattgtgccataggtggtcttttgcccctggcttctttcactgagcgtgatgtgtttaaggttcatccatgtcacgcgtggactagaactgcattcttctgaggactacattttagcctccagaagcatcagggactggccagaggtggaccccagcatcccagctcccagacagtccagaggaggcaggtgttgggagggcgtccggggtggcttcctggaagagatggcgctcactctgggccggtgcagccacccgacagccacagagccccctagagggagtcctggcatattcccaggtgaacctgtaggatggactggcgtgcccgcggcccctgtcctgctcaggactccgagacaggctcacaacctgtccctgggcctcactcatgccagccgccaagctgttcagcatcccttagcccccaggaggcacacagtggggccgcggtcactgagcgtccacacgcctggtgctgtaagaatgcaaagtagagggtctttattgagcatctactacatgctgaaccctggggtatgggtgggcacggcagatgcaggcccccctgggcaggggaggagcatgccccttaagaaccaggccacaggatggacgggcttggccacaagctaggggtagtcactgcagccttcatggcctcctgtgtgcaaagtcagtgctgtgggaccccatctgggtgcacctgctgtggctttcaagtgaggcccaccacggagcagcttccacgctggctgggacagggtcagcggcagggagctccagaccaaaggagcggcggtggctggggcagcggggggcagtgaggctttggacacatccatggggcgggcaggcatctcagcccccacccgcccagtctgcctgctccggggccttcccttccctggacagagctctgtgtgattggctccaggctgcttctccccctggaccctcagggtcagcttagagtgactggctatgccctggcctagatccaggcccgtgtgacaggagagagctaggaacctggcccctcactctgagacacagatggtgtcctctccaagttgcccttgggacggggaagcgccatgtcccctgcagggcaccaggccagccagtggcccttgacagcgaggccctgtctgcaggcagctgggggacttctccctgtcgggaggatgcgtgcgtgttagcatcggggtgcctggttgccccaggggtggtgcagggcggttataggcggtcctagcattttggggttgctttcagtgtatctccgagacctgtggaattctgggaggagaaactccccagcagtgtcctcagtgcgcccccctaccctgtacccgttgctcctgggagggatcctgagtgctcccccccacccaccatgcacccattgccccaggagggatcctgagtgctcccctctccacccaccctgcactcattgccccgggagggatcctgagtgctcccccctccacccactcccaccctgcacccattgcccctgggagggatcctgagtgatcccccctccacccaccctgcacccattgcccctgggagggatcctgagtgctcccctctccacccaccctgcactcattgccccgggagggatcctgagtgctcccccctccacccactcccaccctgcacccattgcccctgggagggatcctgagtgctccccccgacccaccctgcacccattgccccaggagggatcctgagtgctcccctctccacccaccctgcacccattgcccctgggagggatcctgagtgctcccccctccacccaccatgcacccattgccccgggagggatcctgagtgctcccccctccacccactcccaccctgcacccattgcccctgggagggatcctgagtgctccccgcctaccctgcacccattgcccctgggagggagacttctgtagaggcctcacctctgaaccccccactcacaggctcaggggcccagggctgggggcgtcctgccgtctacactccagattgagcccgcacggttaaacagggccctctccgcacgccctgcctaatgcaaagcggtggcttcgggtgggtccccaaggggccttgtgaaccctgggggcctggcccctcccacctggctgcacccgctgggcgggagatcccatcctccgagtcctcagcccctcagcctcagctgcagcccagacaccagggctctgtggggcgggggtggggcagcggttccctcaggtctgtggggctgccctgctgtggttcctgcaatttcctggaaggaggtctggggcctggtgtccagtggggcctgtggggacggactcgggggctctgtggggagggactgggggctctgtggggacggacttgggggctctgtggggagggactggggggctctgtggggagggactgggggctctgtggggagggactcgggggctctgtgaggagggactggggggctctgtggggagggactgggggctctgtggggagggactgggggctctgtgagagggaactggggggctctgatgtgctgggcgtgcacaggggaggctttgcctctgacatccacacctgcagttcccaggcacacacagcggccccatcggggtcctcgcaatcacagtctgtgagtggccactaccaagggcgtctccggatcaggccaggcccagatgctgcccggacccaacccccacagcgcctgccgccacagtagggaccaatggccacagaacactcacccggcctcacttgcacggggctgttcagtctggtgggcaccaggtgggcgctgttctcgcccagtgggaggcctgccagctccttggttgctagttgagatttttccccaagaaatagtcgtgttgttccttctgctccgcctggcactgaggttggtgacacgccccgaccttgctctaattggcagatgagaatttgtcatcagatgtcgaccctgtctacgcagtcccctggcctcggagtccattgtgcatctctgaagggcttgaattggttgtttaaagctgggtaaatgcccccttgacattctgttgacactgtcaatttgctgaacaaactcttccacaggtagcacaggaggccagtctcgccccagcctgagccaaggcccagggaggcaggtcctgtgtggagtcagcctttttgtgagtgcagcggccctgcaggatgcaccgggtttgagaagtggactcccccgtctcccgccacatcccaaaagccctcagccatgagggcaggacgaagccgacggtcgccctcgtgccgagatgacaaccgggcacagaggcggtggctcccagcttcctgccctcttccccgtagtggggttacccagcgtgactcatggcccgagccacaggcacccgcccagggagccacggcggggagacctggctttattagagatgcgttcgtgcctcatcaagtccaaaggaggaaactggcgcgtccctcactttccctgaaacaggctcccccacagcccaagcggtcaggttaaggtgcatttgcagacagatgccctagtaggaggctggagcttttggcccagaattttccctgctgtaggcccatggtcaccgagcctgcccgggggctgaggccctgaggaggtgccattgccccacccaagcctcagacaagtgtcctgccctcgaccctgcgggaggcagcagctcaggccctgaccctggccagagagggcagctctctgaggctgctgtggccgtggcaggcaggggctgggcttgccgggccgtcgagtgggcacagagactatctgggaaggaggtgggcggtgagagctgactccccgcagccgggggacagatgagccccgtgccgcacagcagggccgcgtggtggggccccccaagttccgctcggtttcagctgttgacgagcggaaacacacagttactggaaatgagaggtttgggggagccgccaggggttgaacatgtgtggtttccctgacggcttttcagtaagagatgcttgagctcaggctgggcactggctggtgcgcggagggggctgggccagagtcccccccttgggcctccactctccatccttatagagggacctgggttggtcccagctcccggggtgcagcccctgggtggcccctcctacttccccttcagtggtcagaaggaggctggcctcattcctgtctgacggagagccaggtggggaggccgggcggggctgagtgtccagggtccacatggtggcggggctcaggccgtggcgaggtcctgtcctgggcctccagggtctggcccagcacagagctctgcagctctctggtggacgggcctggctgggctgtcggcagccctggggccaggtgggcagtgggaatggaggtggaggcaggtgggtggctgcaggtgactggaaggcttggctccagcctgcaggggctgcagtccaggccggccacccccacgagaccttcccccttccaggtgtggggtggcactgggtcaacaacacaggccacggacttctttcccccacgtgggccgtgcgaccccgggccgccaccacctctctgagctcccctcctccttaggagatgggaagcggctggggccatgaagtgtcccccagggctcctgacagccccagctgccgtcctcgtggctgggcgactgccgcgaattgttgcgccttcttttgagttggctacggagtcatggcggctgtgggaggtgtagctgggtctcgggcggcacgcccggctcccccggggatgtgtcatctgtgtcatccaccctggagccccttcctggtgctgtgggggcccctccaggaaggtctctcccagaggccagccacaggctctggggagactgtgtgggatttgcatgcagttgtgtgctatttgatcgaggtcatgtgtgggatttgggcgaggtcctgcgggattgggtgaggtagtgcgagatctttgggcgaggccgcgaggcactgggcgaggctgggcattattcagtgccttggaggggcagaagttttaggacctgccaagtccagcccaagaatccccaactttccccacagggaaaggtaccccagacagtccccagcctgtgccagctgtcttgggacaccctggtgtcccccaggttgtggcactgcaggcccctcccccaggtgcccctccttatgggcccctcccagggctgcaggcacctgcctggatcccacttcccaagtgtggggtaatcccaggcgcccggtgatcacgctgggcccgggcagagtgaggctctgagggggtgccaggggcacagtgggccagtatgtgagccgggctgggcgctgggactgggccggcaggcgagcggtgttccgagaggaggattcctgggctcggaggcccctctgtgcctcgtgtggtcagagagcagggagccggcgggtgtgatggggatgaggtgacctctggggccaccactgaagccgccgtccatctgcggccgaatcgggaggcacacagaggtgtcctggtggtttcccgggacaggcgggaggaggcgcaggagggcggcgtctgcccccgggatgccaggagtgctcctccggcagcgtgggcttcggcttcgtccctctttcaccagtgccgacgccccgcgggtgctgtgggtgaaggggcatcggtgccctcctgctgggcgggaggaaggaaggggagcgggaggctgggtctctctcgcccagggctctgcccccaccaccctagggttttgtgtttcggtggagctgtaagaatgctttgtctgctccagacttcccggtcctgggagatcaggtggtcaggcaaaacatccagaccgtctgggtggggctgggggtgcgggggacacgcgccttcctcctctttcccagggagcttctgccactcctgtgccaccctggggagctgccttgccctgccccgctctggtccccatcagcaggtgtggttctgagctgccttcagatccgggtggtgtgctgggcatagctgccccgttttctcacctgtgaaatgggcccattacacgcccccagggcggttgtgggggtcccatgagacagagcttggaaagcccgagtgtaggtcaggccaggagggttgtgggctcagtttcttcactgctgggctggtgtgtgccggacagatgtctcgggatcccttccctccctgcagcattcttaacaaggacgctggacatggagtcagcacctccgggcgactgccctgctggctgtggggctcactccagaggagaacaggagcccctccggggagccccttcctgccacccccagcgacaggatctgttcaggagcagtggtgggaggttgccagaagcatgtctggcgctggcccggagcgcagcctgtgatgcccgacttcattcatggagtgtggtttgagccctccagcagcgctgctgtgggcctgtccattgccttccctgcctctgagccatcgtggggtgcagggctgggctgggtcttcttgggagcagagccccggcgtgtcatgaccatcttggcctctccaactcaagaggtttgtccacatgggtccctaggggccgttggggtgacccagggcaggagacacatgcctgcttttgggggatccgcgtgggaaattcccgcagtggagcagcaggtggggctccagcaggcgtttttcacactccaaacagcctgcgggggcactttggtgacacctagttcctggggtctcagagcctgctgggctgtgtcttggcattttggggaggggctggccacatgcccccagagtggccaccccagctccgccatctccacgggccttctgtcggtcagatgcagacagccgttcccatgtcgggtgagggcattgttttcccggctgcgggaaaggtagcttcccgggaggacaggttctgtccccatcccgcctcccacacaaagggtttccccggagccagaggaggaaacctggccttcctgcacttcctccttcgcacattttaaaccatccgaggatgcaactgggggaaaagatttgcagacaaaagagctgggggtgccggcaacagctgtttgggccggaaagcctggccccggctcagaccccggctgggtccctgcgctgtggcgggccggccgcgacccccgccccacccaactccgccccctgctgcccgctgtctccggagcggcggctgtttggggctggctccttttctgggcccccacctccctgaagcccccactgcccctttcctccttcctggggccctgggagccagggcagggcccccgtgcagctttcagcagctccagcccaacggctgcaggcgctggggaagaccacagctcaggtgggaccgcaggtggtggctggaggcagccatcccacatcgcagcccccaatctcgtggttttgtgctccaacggtgaacaggcctggtggtgctgggctgtcgtgggccccttggccccctcggtgcctgcatccctctctcctgtccaagatggggaaggaagccgggagcagaaagggaagaaagacccagcggctgcagggcgcctttcagggcctcctagccaccgcagaggctccagccagctgtttgaacaggggttgggacacagggtcctggcaggtttgaggagcccggggccttccttgctatagctctttgttctgggggatttggggaggccagggaaggggctgtgagcaacgaggttccagcatcttcccaagcctcctccatcccccagggctgggctgcttggccgttccagtgggagaggacccgaggtgggaccccgagccccctgcccagctcatttcttagcagccggtgcctcctggaaggtgggtggtgcccactgggattggggaaacttggtctagcctctacccaagggaggggctgaggtcccaggactccccctgccccagaagccttggtccgggctagagctgggctcgttggcctcatggaagcctgccttgggaagcatccccacccaggtctggccttgtctccccgtctccagtagggggtcacagtgtccccccagccagtccacatatggccccatttgcttgggcaggccgatgggtgggcctgtctgtgtggcccaggtcacctggtggggcccactgtcagtggcgtaggtagaaggtggtcagccttgctgggtcttagcagagcacggcaggatctgggtctggggagggcgtgggggtgcccctgccatcacaggagcaggcagagtgggagccctagactcccctctgggcagaaagccccttgaggctgggggcaggtcctgctggtgagggaggggtcccaggggcaggggcaccctcaggctggccgcctagcgattggctcctgcaggacgtggccacgggctccctgggagcagcagctgttgggggtgtctggggagaagacccccatttattgccctgtgagggaccacactgctgccaggggacccttgggcttctgtggcaggacagtgggccgggattggcagtgaggcccaaggagggcaggtggggctggacctgtggctctgctggggagcaggtgggatgtgttaagatgctgatttcagccgggcagctcctccccttcccttcccagggagccggggtgtgcagggccgttccttcccctctgggaagtgcagctcctgtgcaccggagaggcccccgcactgtccctgcccgtcccaccaactgtccctgcccgtccctccactgtccctgcccatccccctcactgtccctgcccattccccgcactgtccctgctcatccccaacactgtccctgcccatccccccctcaccgtccctgcccatcccccccgcactgtccctgcccatccccccccactgtccctgcccatccttgccttgggaggtgctgtcacctggtggagccatgggaagcacctctcccacccagggtctctggttcctgtggcgggtgcagagccagccacatcactgacaccccagctgggttgggtccagctgaccccacacccccacccctctgctcggcctctgcctgtgcccccatccctggccctgcatgaccataaactccttgagggcaggaagtgagtgagtcctacccgcactgagtccctctcacccctccttctcattttggggcggagggaactgtcttctgtcccctgggggtggcagatggccgcttagcttagaaaggaaaacagcacaatttagaattcgtcctgggtgaaaggtctcggcagcatctgcctcctgctgctttctggagtcgcatttccatggagcggccctggcagggagggtgggagtggcacagtggaaatactgaggcgggaacaaagtggtggcggtagaggtggcgggagcggcacagcaggcgccggggccacttggcaccctccccccgcagccctcctggagtccccgcccgccgctcacctgcggggggcccagataggacaggttaccccagcgccgccaggccactgagcgtgggggatgggacaggcaggtgccgggtgaccctaagagggacgcacggaaggggagtccacgggggcacacctggcgtgggttgggtctcctccgtgggagcccgagagctgggtggcttggtggacagggcagctctctcgtccagtcgggggagactggcgttccctatctcaagcctcactttttagccccagaggggtctccccaccgcccctgataggaggagatgcggggacggtggaaggtggggtgcgggtcactcatggaagccctgaggatccccgtgggcgcggcagctgttgggtgccacctcactcggccaagccctggcgcccacctcgcggcccacacccacctggccgccgggacagcattgaagacagagtggcccgggtaccgggggtgtggccagcgccaaagctgtgaaggatttgctcacaggctggtggtcctggccatggccatgctgcaggcctgaggtccctcccaccttctcagggacgtctgggtgctgtgcggagggcaggtgttcgccgtctgtagggtgctccagctctgtggccatgtgggagagaggtacagactggggcgggcacaggctggaggctgcccacagcagcagcgggagactgggcccaaagctgccccccacacacagacccccacacctggctcaaaactttctccaggctcggcccggttccccccagctagcgcgtctcacggaacctccaagccgtggctgtggggccgtggcaggggccttccctgtggtgtccgatgcccaggctgggagtgggggcggacaatgggccctctcagcctgcattcccccacgggagcctcctcaggcctccggctggggctcctgccccacccgctgggagcagctgccgccacgtctgacacctgctcccagccgccctttgtccgagcaccgacgcctgatttatggggcgtgttttcctcttgctggcccggcgtgatacagcctcgttaactgggatgcgtccggttgggcagattctcccacagtcctccacgttggggtccgcgctcagggtggggagtggggcccggtgtccgggcagagtgtcgtggtccattcagggacagccaatgtcctgtgacctcagggcacttggtgggagactgctctaggggctcggacctccagcgtctcccctctggggtcccctaaagctgtgggatgggcctcccctgcccctcctccccgtcttgcccagcaggtgagcttttcccgctccttggagcctcgaggggccgggaggcaggggaccagcttgcatgggccaggctgaggagcctccagccccggctttgatgaccgagcgccctctgtcctgtacccaccccctgccgacttcagcggctgggaaagcaaaaagggccttttctccaagcgggagctgtggccaactcccgcctgacaatggggcatttatgtggagggagggcgcccctcctgtggccacagcccagcccagcccagcctgtgcactccacgggttcccagcggccgctccacctcggggaccggccagcctgtaactggatctgcatgcagtgggaaccacgtctgccctcccaacaggtgcccgcagaggcaggtctgtcgctgcagccccggagtgaccggccacatgggatggaggagggggagcctcattccggggctgtgcccgtcgctcactgggctggcaggagccgtagcaaggcctgagtgaattccccagagcccctttggaaggggtgacatgtgttttctttaagccagttggtttgggacttttggcttctggcaacagatggtcggccagagtggcccttttgcgttctctctacccaagccgtggtcacgggtaaaagccttcggggaagacagatgcctcccgggcctttgggacaggggcgtggctggctgctgagaaacgcacaggaacccccacccccagcctccacaagcccctcggggtaaggcccccccaggccactgccacacatagcacaggtttgattggagacactggggtgggaataagcgggagaggaggcgaggacttggggggccggtgggggtcctgtgggaagccggcagcttcagggccggtcctggggcaggcggccgccgcagccccgcacccaggtgggctccggaaggcgggacggttccctctgtacatcccatctggaggaggccatgcccacccagggcctgagccgtgaggctgctgccttcccgggccgctggggccgctgaggctggtggcatgttctgcttcagaggcttcaccactgggaagagcggcgcccggcgggtcccagaccttttcccggagcgcaaggccaggaggtgactggggccggagatttatgaccacagcaggtggctggggggggcaggctctgcgcctgttgccgcagggaacaggtgagaccaggcctgggtggagatgcaggacccctcccctggctccccttgttctctctgagcccagactgtgtgtccggggtgaggggcagcctttcacccaccttgacggggttgcagagacctggcagagggacctcctcctggcaccttggtttccccggctgtaatgtgggtgcttctgctcctggctgatgtgcctggatgtgagttatgaagactcaatgccgaaagggaaacgtgtctgggggctgagcgtgggcagggaacgggccagccttcatccccagtgcgatcttgacatgagatgtcccatccccattgcagtctcagcctgaggtgtcccatcagaaaggcttcctggccgggcgcggtggcttacgcctgtaatcccagcactttgggaggccgaggcgggcagatcacgaggtcaagagatcaagaccagcctggccaacatggtgaaaccctgtctctactaaaaatacaaaaattagctgggcatggtgtcaggtgcctgtagtcccagctactcgggaggctgaggcaggagaatcgcttgaacctgggaggcagaggttgcagtgagcctagatcgcgcccctgcactccagcctgggcaacagagcaagactcaaaaaaaaaaaaaaaaaaaaaagaaaagaaaaagaaaggcttccacgtaggaaggggctgatccacactttccgtggctgccatcatgttgacacctgaaggttggaaaaaccacggcctttgttactgcccaagcaatgcctgttcgctttagcaaagctgggaagaaaagcagataggcctgcagacccggaggctctacggagctaatgcacccggctcctctccatggctctccgcgggtgtagacccagacccctgcccgggctgtggagtccaagctgggttctgctggaacatcctagtctctagcttgttccccaagttagcagtcatttgtcttcttctttctttctttttttgagtcttgctctgtcacccaggctggagtgcagtggcgtgatctcggctcactgcaacctctgcctcctgggttcaagtgattctcctgcttcagcctcattcagtggcattcagtacattcccaaagttgtgcaatcgcggcatgtgtctggttccagaacattttatcagccctaagggaaccccgctaagcagccgttgtgcccgtgcccggggtgtggggggaggcggctgtgcccatgacaggttcccggtgctgagtggcgggggcgctggggaagcaggtgggaactaactgccctggcacatctgccaacagctgtggcggggccttcgtgggcccgcgatgccaggaccccaacccgtgcctcagcaccccctgcaagaacgccgggacatgccacgtggtggaccgcagaggcgtggcagactatgcctgcagctgtgccctgggcttctctgggcccctctgcctgacacccctggacaatgcctgcctcaccaacccctgccgcaacgggggcacctgcgacctgctcacgctgacggagtacaagtgccgctgcccgcccggctggtcaggtgagggaggacccacagcctgaggggtgggcagacccaggcccgccgccagctgcccaggcaacttgaggtacttggcgggatccaggcccgggtctctgacccggaagtaattgggagcccctgccccagggtccctgcccccctcccagacctggaatcgcctcgttttcagctgcttgctctggcccaactcttgctgtccccgcttctgcgagacaaggggagcctctgtgtccaggccgcccctgcccccttcctcctgccgtgcactggccctcacctgttagggtgaagggtgtctggaggtgtcagctctgggaagagacggcccaggctcaggcctcttgggagctgtggtccttcatctgccaaaggcgaccggtctcacggcaggtcctgaggatcaaatgtgatagcacctaaggtggagcccaggctggcacctccaggtggcctgaagggagggaaggcccggcctcggggagcagtgaggccagcacgaccctcttgtccccttgtctccagggaaatcgtgccagcaggctgacccgtgcgcctccaacccctgcgccaacggtggccagtgcctgcccttcgaggcctcctacatctgccactgcccacccagcttccatggccccacctgccggcaggatgtcaacgagtgtggccagaagcccgggctttgccgccacggaggcacctgccacaacgaggtcggctcctaccgctgcgtctgccgcgccacccacactggccccaactgcgagcggccctacgtgccctgcagcccctcgccctgccagaacgggggcacctgccgccccacgggcgacgtcacccacgagtgtgcctgcctgccaggtagtgctgcccgctggccggggtgcacgagcccctccccggctgccaggcccagggggtgggaacggggcgcctggtgtaggggcagccctgggagggcccatggcggggagttgggaaggcgggatggcgagttccccagactgcgtgtggtgtcggggggacgcgtctggagcggggtgtgcgctgggaggaggcttgcacagggtccaggtgccagcccgtgtctctggagtttcccggaactcacattcgagctgtaggacgccctgcctccccccagtgcaggcaccctgacttgcgcaacccccagggtttcccctgcagtggggctggggccggagagggcgtgggagctgcgggggcaccatcacttcccaagccatggcccttcctgccatcctgctggtctcctgcgggtgtgggtgacaggtaggcgcagccgcctgcccgtgtccccagtgctccccgatccccgtgttgtacgtaggagcctctctgctgtagttcttgtttgagtaaattttgcagcagctctaaaaataaggaagagttttgaaaacctccagtctcggccgcgcgtggtggctcacgcctgtactcccagcactttgggaggccgaggtgggcagatcacaaggtcaggagatggagaccatcctggctaacacggcgaaaccccgtctctactaaaaatacaaaaaattagccaggcatggtggcacgcgcctgtagtcccagctactcaggaggctgagggaggagaatcacttgaacccgggaggcggaggttgcagtgagccgagatcccgccactgcactccagcctgggcgacagagcgagactccgtctcaaaaaaaaaaaaaaaaaagtgaagagaaaaaagaaaacctccaatctcagctgcacagaatggctgttaggtgggaatggggagagggcattcaggcaggggtggggctggagggtgcacagggtcctggctgacccacgggtggcccaagggctgccccacccccttggaagccccaagctggcctggcccctgcaaaggggaagctccctggctgcccagtcagctgagcccagccacctctgcgtgcagacaccagacgtgtgcgtttcctgcaagtcactgggcgagcgtggggtggggacagacactccctggccagcttggatctctgcagggtggggcgcagagcccttctgctggtgggggctcagatgccttcctagcagcacgggaccctacctccagtcacacggattgaggggccaagctcttggggggccgtggttcaggctagggcaggtggggtgtgtgcggccttgtccaaggccacctgtgtgcagagctgatgcccacccgccttgggcagggtgggtgaggacctcctggtgaggcccagcggcagagatgccaggggtgctgggccggctcagagccactgcccgtgcaggggcagctcagggccctggggagtgggcagggagggaaggggaggggctggtggggttcactcacttgagtgtgggtagatctcagaggctggggtgctgggggctgggtcacccgtccggtgaggggtgtgctcactgcctgctgtggagtctggccgtttcagggtgagatgaccatccgggggcctccccaaatgactcaggcctgccagaccccagcttcagactgtccccggcggcccctgcacccaggccccctgaagggccctcagccacctctgggtggtcaggagcccaggagacagctgtgtgtggagtcacggggaaccgagatgggggcggccctgagctctgcaggcccgggaactggctgggatttggggtcgcacagcctgcctggcacgtcagcactgtctcctcgtggggtcgctggccgaggctacgtcgcagagggtccagctggggtccacggggctctcgctggcttcccgccctctcccccactgtgtgcctcagccagtgctttgcagggcagccctggggtcgcaggcccagccaggggccccatctgcctcggagccggggtgcagggccccacacatgagtgggaccgggactcaggctccaggctctgaattttttttttttttttgagacaggtctctgtcactcaggctggagtacagtgacgtgccctcagctcactgcagccttgacctcccaggctaaagcgatccttctgcctcagcccctcaagtagcttgggaccacaggccggcgccaccacgctttgctacttcttgtatttttttttgtagagacggggtttcgccatgttgtccaggctggtcttgaactcctgggcgcaagcgatccacccacttcagcctcccaaagtgccgggattccaggcgtgagccaccgcgccagggctggggtctggttttgggtgctccccaagctgatttgcattttggattttggttgtctctggctgcctgcttttgctccggtccagcagacagacagaacggacggggtggtggcggtggggcaatgtctcagagggaggggccgagcaggtgggagctccaagggcaacgggggttcaaaggcatctcgggagggcggcaattagtaaccggctgcaggtttggctgttgccgaacgcgcctttctgggttgatcattgaaccagcgggagttgagtggattaatagctaactggctgccttggaggcctgggtggggccatacctcgggggagggggccctggcagcctgtggaggaggagggggaggaggaggtgggcaccagagctctgccccagggaggatgggccatctgaatctctgcagcttccctggggctgcgaggggcccaccctgccccagccagcagcctgctggccccatgtccccctgctgctcagagcccaggccccagtgtcagcccctgaagatggggtgtgcggcccccctgtggagacattgtagggagctctgagcatgcaggcggcacccaggtgcaggagctgccggaacctcttaaaagagacccaagggtttttgtgacagaatcttctggaaccctgtgttcctgagtccctgtttagccagtcctgtccaaaatgattctttcaagcagggcgtgtccctctgggcactggagtgaggcaggggacgggcacagaccccgggggccccagggcagggccgtggaggccaggctcttgtgtccagagcagtgtgtcgggggtccaggcaggagccggactggacctcagggaagaggctgacccggcccctcttgcggcaggcttcaccggccagaactgtgaggaaaatatcgacgattgtccaggaaacaactgcaagaacgggggtgcctgtgtggacggcgtgaacacctacaactgccgctgcccgccagagtggacaggcgcgtatacgggtcgccgcagggcggggtagccggggcggggctgctacccacttactaaactgcactcacaggcatagcggggagcagccgagaccctgtcccaggccaggcagactagggttggccgagaaggacaacatgatgggggccccacttcccgtggccagggtctggtgcccctcacctcgggggtcagcacagacagggccctggttggtctgtgtgggccgtttgcaacctggctccaggcagcccctgtgcccagtggggtgtcctggcattgagggccttcagcaccccactcaggccacgcttcctgggccagtcacagggatgcctggatgaacagacaggccctgtgttcgggaattaccctctggtggggtgacgggcaaaggtgcaccccgacgcagcagtgtccacagagcacaaagaggaggcaagactccatggtgctgggcctgcagaggaaggagtgatttaggctggcggtgggtggaggagtcagcccaggaaggcttcctggagggggcggcattgccaccctgcgtcttaggggacagggagctcagggagtggcagctgcccggggccgacagctcctgttccctgcaggtcagtactgtaccgaggatgtggacgagtgccagctgatgccaaatgcctgccagaacggcgggacctgccacaacacccacggtggctacaactgcgtgtgtgtcaacggctggactggtgaggactgcagcgagaacattgatgactgtgccagcgccgcctgcttccacggcgccacctgccatgaccgtgtggcctccttctactgcgagtgtccccatggccgcacaggtgagtgccttgaggcccaggtgggcgcagggggctcacatgggccaggcctgagctgtgtgacctcacccagggactgtggccctcctgcacccaggataacctgaaagggcctttctggtcagggaggccggtggtcgctgtgagtcccccggaacgtcccaagtgtcacgggatgcccgacggggtcacggcgggcagctcctcctggggtgtcagtggggttggaccccagccgtgggtggtgtgccatgcctggcccaggggccgtgcccactgaccgccgctgcctgcccaggtctgctgtgccacctcaacgacgcatgcatcagcaacccctgtaacgagggctccaactgcgacaccaaccctgtcaatggcaaggccatctgcacctgcccctcggggtacacgggcccggcctgcagccaggacgtggatgagtgctcgctgggtaggtgccagcacagggggtgcggccaggtgggggtggcagcctggccccagaaccgatgagaagtcgattctggcttcagggggtgcccagttagatgggggatgggaccctgccagtccgatgggggtggtgtgcagtgaggtgttgcaggggccagggtgcctggagcagcctctcacccgtgtgccctcgccaggtgccaacccctgcgagcatgcgggcaagtgcatcaacacgctgggctccttcgagtgccagtgtctgcagggctacacgggcccccgatgcgagatcgacgtcaacgagtgcgtctcgaacccgtgccagaacgacgccacctgcctggaccagattggggagttccagtgcatctgcatgcccggtgcgtcggccggggccagggcgggaaaccgagtcgaggctgggcagccttggaggggcagccccgggaacatctgtgggttgcttccgctttccccagcctccatgccttctgggcccacagcctgcacagggcatggggaaactgaggccaggccacagggccagcagagcacgggggcagtgctaggcagatgagggtgccgggccaggggccacgggctgcaggggagcgggtgcgcagggggcccgtggtggctgggacactgggctggaggcagggttcgtttctgtcccaagtccacagctgtgcccagtggggcactggggccgcgcgtgcccccctcactgttgccccaccccacaggctacgagggtgtgcactgcgaggtcaacacagacgagtgtgccagcagcccctgcctgcacaatggccgctgcctggacaagatcaatgagttccagtgcgagtgccccacgggtgagggccacccccgccccctgcccccgggtcgtctgcaccctggcctcctgaggggtgcctgggcgtgggttgtgtcccctgcccccgggccatctgcaccccggcctcctgaggggtgagggccgcccccaccccctgccctcgggccgtccgcaccccggcctcctgaggggtgagggccgtgggttgtgtcccctgctcctgggccgtctgcaccccggcctcctgaggggggcctggccgtggattgtgtcccctgcccctgggccgtctgcaccccggcctcctgaggggtgcctggccgtaggttgtgtcccctgcccctgggccgtctgcaccccggccttctgaggggggcctggccattggttgtgttcagattcccaggagagcgagggttttgcctcatgagtggatgggagtgttttcagacttccccgaaggaagggcagggcccagtggggagtgggagcttgcccaggggtcgcggtggagcccagggccaggagatcctccttgatctgggtgcagccccttctgcctggagagaagggtataccaggagctgcagtgcccagacagggaggaggctccagcctggctttctgagggctcgatgctgggagggaggccagcctgccctgtcctgccatgtcccctgcccaacggcacgccagcgacaagggtatgcagagaaccacgtggggcaggttggcctgcaatggagatgatggctgcccggggcggacttggaggaactctcaggggcctgggtgaaaggtgtttccatctgtcccagagctgggggccggggcgcagagcccagggaggcgttgccagcccaagcctaggctcccaagacatagattacccgtcccagacactggagcgaggggagccccattctcagcccggctccactgtagccatagcaacccagtcggtttgggaaaaaggccccttctgtgggagcgagggcgtgtggtgctgggggaggggctttgatccggggagcgggcagcgggaggcagggagagctggagctggctgagctcaggctgagtgtgccctggggagcccagccaggcgctcactgctggggtctggccaggggtccctgaagggccatagtgctgttgcacatgactccctcccctcccctccccggccccaggcttcactgggcatctgtgccagtacgatgtggacgagtgtgccagcaccccctgcaagaatggtgccaagtgcctggacggacccaacacttacacctgtgtgtgcacggaaggtgcgggctggcgcccaccagcggggagggactggggacgggacagggcactcagggcagtgaaactgacaaggtcatggacaccttggtctgggccacctggtccagaggccgagagcacagctcagccccaatcctgagtaggtgggaatgccacgctcggagccctcctcaggttggcacaggtgaccccaggtctggtcatgggtgtcccgggggccgccagtcctaagtcttcctgtgcccgcccctcccacggtccagggtacacggggacgcactgcgaggtggacatcgatgagtgcgaccccgacccctgccactacggctcctgcaaggacggcgtcgccaccttcacctgcctctgccgcccaggctacacgggccaccactgcgagaccaacatcaacgagtgctccagccagccctgccgccacgggggcacctgccaggaccgcgacaacgcctacctctgcttctgcctgaaggggaccacaggtggccggccaggcgggtggccggcggggggccagtgggcagggcgggcctgaggactgaccgacacgtgccaccccttcaggacccaactgcgagatcaacctggatgactgtgccagcagcccctgcgactcgggcacctgtctggacaagatcgatggctacgagtgtgcctgtgagccgggctacacaggtgagcggccctgcacgtgggggctgactgcactgtgctcagaggtcaaggtcagccactctgccctggggctgctgaggggttgggtgagggctttggtgctgcccacctgggcagaccgtggtctgcagcagagattgcagcgggaccagggctataactggcagcacgatgggtccccccgacccctcttgtctccggtcagagctgtcccaggccgtgttggcagagtggcccagcaggccaagagggagcagccagccctgaggccaggcttaagtaccttctgcctctgtggctcaccagcacctttgagcaggtccctctgcctctctgggcctcagattctcatcagtcagggctgcagtagcccctgcccctggggcccctgggaggatgacttgagtgggcactggtgcccggggaggctggcacatggcacattgtgatccaagatggtttctgacacctggaaggatgtggccagaagggtgatcgccccggctcaacagacagggaaatcgaggttgacgtgggtgggaccccctgggcgctgggcctcggagtctgacccgccctgcccttagggagcatgtgtaacatcaacatcgatgagtgtgcgggcaacccctgccacaacgggggcacctgcgaggacggcatcaatggcttcacctgccgctgccccgagggctaccacgaccccacctgcctgtctgaggtcaatgagtgcaacagcaacccctgcgtccacggggcctgccgggacagcctcaacgggtatgcggcggggccgatcatggggacacatcagtcctaaaccctgggagctctgctgccaggagggtggcacctgcacagagcttgagatgggccagaaacgggcctcggacggggctgggtggcagggagctcccctcggggacgcacatgcctctgggtcctcagtcagactacagtccacacccagcagctgtgtgctgcgtgtccttgtgggctgcatggtgtgctcaggacacaggcccacagtgaccctggaacacgtttccatggtaacagccgcaagtgtttctgatgcccatgatgtgcctggcagcactctgcctggatgggaccatttaaatcagcagggaccccattgccctcatttggcgcagagaaggcacgtgctttgttcggggccacacagcgggcaagtggtggggggcttttcgcagcaccctactgccctgcacttggcatggtcccctcgctaatgaaccaaacccctgccgcagtcttgggtatgggaagcgctgcggcccccacttttttctttattttgagacagagccttgctctgttgtccaggctggagtgcaatggcatgatctcagctcactgcaacctccacccctcaggttcaagtgattcccctgcctcagcctcccgagtagctgagattacaggcatgtgccaccacacctggctaatttttgtatttttagtatatatggggtgggggagtttcgccatgttggccaggctgatcttgaactcctggcctcaagtgactcagccacccccgcctcccaaagtgctgggattacaggtgtgagccacagcgcccagcctgcccccactaaaggactctgcgagtctgagtggatgggcacctccgccagcccatagggcattgcagacccgggagtgcccaggccccggccgtgctgctcgggcctccctcgacctgcagtgtggtcccccttgcaggtacaagtgcgactgtgaccctgggtggagtgggaccaactgtgacatcaacaacaatgagtgtgaatccaacccttgtgtcaacggcggcacctgcaaagacatgaccagtggctacgtgtgcacctgccgggagggcttcagcggtgagtgggctgcgcgtttctcagtgcagagggccgccctcgagtctggggagctggagacacaggatcgggacccaggtccagccagcaccatgcatggtgtctccctcccgtggcaaagccttagctccaggcctctggctcttggagatgaggaggggcctggggtggggagcaggcccagggctgctgttgtggggccctgccaaggtgcctgggagtgctggacatgccgagtgctgtccccttccctccaggtcccaactgccagaccaacatcaacgagtgtgcgtccaacccatgtctgaaccagggcacgtgtattgacgacgttgccgggtacaagtgcaactgcctgctgccctacacaggtgaggggtgggtggggcctgtgctggagggggcggggcctatgtgggaggggcgggacctgtgctggagagggcggagcctgtgctggagagggtggggccaggggtgggggcggcctgggaagccgtgactggagggtaaagtggtggctttcttggggcggggccttccagaaggttctgcgcctcactgagtgccttaggcccctgcagtatgtgggccttctcccgggggtggggttggcagattagcaaagatacaggatgcctgggagaaaattttcatgcaagcatgtgttttacctggcaagcctgccgcaagacacaggtaagatgcaggtgaatccttagcagggccgggcctgggtcactgggctccgtgctcccggcgcccaccctgctggggtctctgggggccgggcttccccacccccgccagccggacctgagggattcctttgatggcgggctctctttgtgtgagcggaacaaggagccctctgtttgggctgagcggggagggggatgttcccccaactgtccagcccctgctatgaacccagccaaggggatcacaggaaatgatctcctctagaaaagacaaagaagagtccacaagcaccggggtcctggcgctccccaggagcgggcagagggtgctgccacggggcctggtcagggagggcctgcctgggccaggcagccgggctggaggtcccacgcctgcggttcccatgacatccagcagcctgtggccagaacgctgttttctttgaccgaagttaaggacctgggttttctctcctgtgtcagtcagtgaggaccctccctccacggctgggcgcccctgtccctttcagacacgtcgatcgggccggcaggaggagcggcggtgctgacccgcttcctatctgcccgcttcctgcttcctttcgcacaattgtcggaaactctggcgcagttcctgcctgcccgggtcaccgtggaaaccaataggaagagaggccctggaaagtcgccccagcaggccagggagataatgggggacagggaagataacgcagtccccacggctataaacaggaagctcggccatgggcttgtgcagaaaaaggccctcggctgtgcacgtggttcccacatagcctttgccagacaccctgcgtggccctggaggtctccaggccgtgccccgtgccccgacacgcaggatgtgctgggggcctgggcctgtcccctccatcgcagcccttgtttgttggcctcccgtgatgggcgtttgctgcctgtgacacggagccccaggattagtttcaggcctcggtctcaggccagggcctttcctcgtcacccagagatgagggggcttgcgtccggggtgggcccaggtccctgcagtgtcgtggagcccacccgactgaggccgcctctcctggtgcagtccttgttcctgggcacgcctggtggggtgaggcctaggctgtgccccgctgccaaccgggaatgaggggtggcttctgagcgtgacatttgtgcagcttgtcttcagcgtccccccatctgtgctccactcctccctgggtcagggtcctggcacagccgggagcgctcaggggtctcggtgcacatttgcctcccggcgggaccagcagacggcactctgatggcggaaagaccagcaggcggtggccgatttgggagatccctctgggtgaggctcccggggtcacgtgtgtctccttcccgcaggtgccacgtgtgaggtggtgctggccccgtgtgcccccagcccctgcagaaacggcggggagtgcaggcaatccgaggactatgagagcttctcctgtgtctgccccacgggctggcaaggtgaggctggccagggcccggtgagggctgggatgggaggtcaggatgtctgcgggacacaggcagctcccaggcaggctagatgagtctttgaagaggagctggtgggtgctgaggaggccctggtcggagaagttctggaatcaggaattgacctgggagcaccgttcccaactccagttcctgtgaccttcttaggccaaaattaggggagaggggatggtcctggggtcacggaagcctactcctgggtcgggagaggcactgtaggtgggtgggccagcctgggaagggcctggagggccaggggccgctggtgaccaaccggcctcctcctgccccgcagggcagacctgtgaggtcgacatcaacgagtgcgttctgagcccgtgccggcacggcgcatcctgccagaacacccacggcggctaccgctgccactgccaggccggctacagtgggcgcaactgcgagaccgacatcgacgactgccggcccagtgagtagccccgcggctctggcctcctccaggaagctctcaggcctcagttcccccgggcagggttggtgcgcatggtgctggccataagcacccagggaggccggagtgtggccggggagggttgggtcaggtgtgggggatgtgctgagggatggccagggtggttcaggagggccccagagccggcttgctcctccctgcacttcgcggaagagtcacgagagcccctcccacggctcttcactgagccgaggatggctcgggcccggcctgcactcccgcctggctcatcgggccccgctgcaggccagggctctcaggcctcccagccctgcttcacagaggttgaggttggcagaagccgggggtcttgctggcatcacctggcaggcagaggcaagaactgtctctcctcccctgctcggtctgtgaagcctgcaaagctgccccctgccctggagcttgaggacaggagcaggtggggagagagaccccaagcacaggagacgggtgtgacgcagcctgtgggtgctggggctccccaccagacacctttgtcacagggctgcttgccgcagcctcggcaacgaaaggctgggctgtccccagccatgcagccttcccggccccctcccgcaggtgtgggtttgtgcctgcccctcacactcacccttccgtcctctcccagacccgtgtcacaacgggggctcctgcacagacggcatcaacacggccttctgcgactgcctgcccggcttccggggcactttctgtgaggaggacatcaacgagtgtgccagtgacccctgccgcaacggggccaactgcacggactgcgtggacagctacacgtgcacctgccccgcaggcttcagcgggatccactgtgagaacaacacgcctgactgcacagagaggtgtgcggggctcgagtgaggccgtggaagggaacgggcggtgcgggccacacgcagtagctggcagcctggcacaccatgcaggcgtccgcctaggccggctgggcacttagcgctggctgcattgagtccagacattgttcattgtaccgacctgtccctcctgagagggccattgtgacctcctcctgtgtcccgcaccaggagcgccggtagtctgtcctgaagaactggtgcgcttccttctattagacaacgagaactctgtccgttcttgtttcctttttgccgtgtttgccaggaagctcatttggtaaacgtcagtctcgtccctggtttctgacgtaattacctcccgtgttaccaggacggtttctggtttctccctcatttactttaaccaccctatgcccacgcgtttggtaaaaccactctcgacctgacttataaagaaagcaggggagggaggtgtgacgtggtgtgagagccgggccccgggttcccactggcctccctgggtcagccaggctgccctgggcctgtcctggccatcaggcccctagggttgagcagaaggggaggtgctggcgaggcagaatctgctggagcggggacccaccaatgccctccactcagcccccgcctgcccacccccttgcagctcctgcttcaacggtggcacctgcgtggacggcatcaactcgttcacctgcctgtgtccacccggcttcacgggcagctactgccagcacgatgtcaatgagtgcgactcacagccctgcctgcatggcggcacctgtcaggacggctgcggctcctacaggtgcacctgcccccagggctacactggccccaactgccaggtgagtgcgccggccacagaggtgcccgaaggaggggccctgggtgggtgcctacctgcgggaggtgggaacggtcaccccaggtcccactgtgtcggctcggggtcacccccacacccccgggcagagggtttctggggatctgagcagccggtgaaggaacctgatgcggaagcagcaggcaccttcgtttcaatcccaggtttctggagccggggcaggagctcaggaattggggaattgaggaaaagtgttccttctagcaaaggccgagggtggtctggacctgctgagggccctgagggagacccagcccaggctgttcctggtgtgggggtggtggggagtccaggggcggcagtttccacttctgtagaatgggttgcagcctgggttggagtaggccccttggcagatgtgcgttctgagctaccggggaaatggccggggcgcgggcacccagctgaccccaatctgtccccagaaccttgtgcactggtgtgactcctcgccctgcaagaacggcggcaaatgctggcagacccacacccagtaccgctgcgagtgccccagcggctggaccggcctttactgcgacgtgcccagcgtgtcctgtgaggtggctgcgcagcgacaaggtaacctgctgtgcccacccagctcgggtcccagcccatcaaggtcctctgtgggcctgggcctcacctgtctaccaccccatcccccgcaggtgttgacgttgcccgcctgtgccagcatggagggctctgtgtggacgcgggcaacacgcaccactgccgctgccaggcgggctacacaggcagctactgtgaggacctggtggacgagtgctcacccagcccctgccagaacggggccacctgcacggactacctgggcggctactcctgcaaggtgggggtccctcctagggtaagggttgtggccggcacgagtgttgccacacaccaggccctggctgggagctggcccagtggagaaaactgaacctgataggcccatgcactgttcagtctcattaggggagggctggggtaatcagggtagactgcctggaagaggtggcctgtggaaagcctgaaggagggtacctatactgagaagtgggatggggttttcccttcccctagattgtgtctgggcttggccaacacctaccctgaggccctcacctctatcctatgggacggggtccacccacccccaacaggcagtgactccggtcaccgaggccccgccagggtctgttgggctgggtctctctccaggtctgacaggagcgaggggcccgtggcttcgctggacctgagggcagctcatgtggccctgtcagccctcacagtggggtgtgggagcactgcatcctggcgccggctgagccgaagggcccctcgttctgtcgcctgcacagtgcgtggccggctaccacggggtgaactgctctgaggagatcgacgagtgcctctcccacccctgccagaacgggggcacctgcctcgacctccccaacacctacaagtgctcctgcccacggggcactcagggtaagggccgctgcacggagggctggtgttggccatccatggccagggcaggggcagggcaggcaccccgggaccggccagaggcatccaggaaccagccagaaactcccattttcctgtgtgaggccaaggccgactcacagctgcccagggaaagggcccagagcgggggtcccagtgggaagggcgtctccacggcacccttgacacctgcctctcccgagtgtccgtgcagccccagacctgagcgctcgtcttccgggacggacacgcggcacggcagggccggggtgtggcgggcttgggccactgacgaaacctggccccgcaggtgtgcactgtgagatcaacgtggacgactgcaatccccccgttgaccccgtgtcccggagccccaagtgctttaacaacggcacctgcgtggaccaggtgggcggctacagctgcacctgcccgccgggcttcgtgggtgagcgctgtgagggggatgtcaacgagtgcctgtccaatccctgcgacgcccgtggcacccagaactgcgtgcagcgcgtcaatgacttccactgcgagtgccgtgctggtcacaccggtgggtgccgcgcccaggcgggtggggcgtgtggggcagcagggtgagcctctcactgccctgctcttacccctagggcgccgctgcgagtccgtcatcaatggctgcaaaggcaagccctgcaagaatgggggcacctgcgccgtggcctccaacaccgcccgcgggttcatctgcaagtgccctgcggtaggtgcaggggtgcagggaggcaggggcccgccaggggagacacctggagaggtccacgtgggggcctcggggcgcagaccgggcagtgatcctcccggccttcatcctcctcctcaccctgatgtcttttttttttttttagtttcaataaatgattttagagacattttagatttatagaaaaatggagcaggaagtagactccctggggtggctgtcccctgcacgcagttcccctggttagcagcttgcatcaatttcactctggatttcagtgatacattgttaccaacagcagcccttcctgtacctggggcttgcccttggctttgtggttgtgggtttgggctgaggtatgacatgcctgcccaccctcgcaggatcacggcagagagtccctgccctaaagtcctcagcactccaccagtttaccccttcctccatctcccgaccccctggcacccccgatctttctctgttggtagaatgtgtgtaaagggttttgctgctgggggcaaggttgcaggccgcctcccaggttagaggagagcggtggcactgctggccgagggctgggtgtgaggtggcgggggggcggggggtggcccaccccgacaccgtcctgtcttccctctcgggcagggcttcgagggcgccacgtgtgagaatgacgctcgtacctgcggcagcctgcgctgcctcaacggcggcacatgcatctccggcccgcgcagccccacctgcctgtgcctgggccccttcacgggccccgaatgccagttcccggccagcagcccctgcctgggcggcaacccctgctacaaccaggggacctgtgagcccacatccgagagccccttctaccgttgcctgtgccccgccaaattcaacgggctcttgtgccacatcctggactacagcttcgggggtggggccgggcgcgacatccccccgccgctgatcgaggaggcgtgcgagctgcccgagtgccaggaggacgcgggcaacaaggtctgcagcctgcagtgcaacaaccacgcgtgcggctgggacggcggtgactgctccctcaacttcaatgacccctggaagaactgcacgcagtctctgcagtgctggaagtacttcagtgacggccactgtgacagccagtgcaactcagccggctgcctcttcgacggctttgactgccagcgtgcggaaggccagtgcaagtaaggctgcggggctcatggggctgagggaggacctgaacttggatgtggcctggcttgggcccggaggccagcatgcagttctaaggctctgctcagggggtgcagggacgtcccccgcggctggccagtgggctggaggcaccggacggcgggtgcgaggccccccgaggaaggcggcctgagcgtgtcccgccccccacagccccctgtacgaccagtactgcaaggaccacttcagcgacgggcactgcgaccagggctgcaacagcgcggagtgcgagtgggacgggctggactgtgcggagcatgtacccgagaggctggcggccggcacgctggtggtggtggtgctgatgccgccggagcagctgcgcaacagctccttccacttcctgcgggagctcagccgcgtgctgcacaccaacgtggtcttcaagcgtgacgcacacggccagcagatgatcttcccctactacggccgcgaggaggagctgcgcaagcaccccatcaagcgtgccgccgagggctgggccgcacctgacgccctgctgggccaggtgaaggcctcgctgctccctggtggcagcgagggtgggcggcggcggagggagctggaccccatggacgtccgcgggtgagtgagacccggcgcccacggtcaatccccgcaactctcctgggccctccccgacggcctccctgcccctcacggccggcgccatggcaagcagtactctccccactttatggtaaaagagacggaggttccgagaggacctgggacttcagggcctgcgcaggcaaggagtagaggcagcattccagctcagggccctgaccccacagccacacccttttcctgggccactgccttcccctggacaggcggcactcctgtgcccagtaggtgattttgagattgagctgtgccttaggcactggatactacactgattaaaactcagccctctgccaggcgaggaggctcacacctgtaatcccagcactttgggaggctgaggcaggcggagcccttgagcccaggagttcgagaccagtctgggcaacatagggagaccttgtctctgttttttttaaaaaagtattaaaagaagtaaaaaacaaaacactcagctctccaggggttcccacagggctgaacagccccaccccagacaagaatgccgcttggtcatggcgtctgcctggcttgggctggagaggaggcaggtggaggtcctgggagggggcattgctgggccttgcagttggaggaggagctggtgggggtggggggtcccacggtgggagaacacaggcaggagcagcttgagtgcagggggcaccccacaaggctcccgcccatgcctactcgatctggggcagctggacccaggagccaggttggttgtgcccttcgtgtgcctgaccctggtgggtttgcctgtcagttctgctggcttggagcaatcctggaggtcagaagcatcatctcacaggctggatgggatcctgctcacgggaacccagtcctggggagcagagctcacccccagccagcctcaccacacagcccaccaccgctgcacccacccccacctcacgcctgtgcttcctgcagggcctggggatggctcctgggggaggactgggctcctggcacatactctgtcctgagatgaggaaacgtgtctgtggcaccagcaggagccagagagggtgtcagggcgggccagggagagcgcgttggtgggtatctgggatgagccgtgatcagcactggccggagtcggggggctggcaccagtcccctgcagggtagctgctgtcagacctggcttcccaccaccccaggctgcctcaccatgtcctgactgtggcgtcatgggcctcagtgtcctgcggcagcatccctggccggtgggcgggggaggaggaagcctcgggtcccagcccctctctgattgtccgcccagctccatcgtctacctggagattgacaaccggcagtgtgtgcaggcctcctcgcagtgcttccagagtgccaccgacgtggccgcattcctgggagcgctcgcctcgctgggcagcctcaacatcccctacaagatcgaggccgtgcagagtaagtgtggccccatcccgggaacaggctctgcctgcagggggtgccatccccccgtgccccagacacgctggctgtttgtgccagttgctacccacgggtgtgagcgttgccgtccgagttggggtagggcttttctggaattttctgaatggcactccgcccccacctgcggcggtcacagctgccggtggagccacctgggaacgagtccagccacgggaaagtgggtgcctgcttctctccccaccctttcctcctgaattttctttgttgggtattatttcaaaatcattacggctttttttaaagaaaaaaaaagagagagagagaagaattgatcggtgtcatgtgaagtgttgaagtttgtatcttgaaaatccctctaaatcctttgtcttaacagctcagtgcgagtgcagcgatttgaagttgactaatcctccttccttaaaggagaaaaaagtaaaagccgtctccagatagagtcggctggtgcaggagagaatttagcgatagtttgcaattctgattaatcgcgtagaaaatgaccttattttggagggcgggatggaggagagtgggtgaggaggcgcccggacgcggagccagtccgccgccccccggccaccagcctgctgcgtagccgctgcctgatgtccgggcacctgcccctggcccccgtgcccgcaggtgagaccgtggagccgcccccgccggcgcagctgcacttcatgtacgtggcggcggccgcctttgtgcttctgttcttcgtgggctgcggggtgctgctgtcccgcaagcgccggcggcagcatggccagctctggttccctgagggcttcaaagtgtctgaggccagcaagaagaagcggcgggagcccctcggcgaggactccgtgggcctcaagtgagcggacgccgcccctgcttctgggtccccggtgggaggtgggacctggccgagcatcctcaccgggagtctgcccctcccgacccagggcccacctcccacgccaggcccgggccaggggtctctgggggcttcctagggagctcgctcagcctcacttctcgacccctcaccccccaggcccctgaagaacgcttcagacggtgccctcatggacgacaaccagaatgagtggggggacgaggacctggagaccaagaagttccgggtgagtcgcgaggctcccgggctcctgggctcccgggcacctgctgccgggctgccctgacaggctctgctcactccctctatgtagttcgaggagcccgtggttctgcctgacctggacgaccagacagaccaccggcagtggactcagcagcacctggatgccgctgacctgcgcatgtctgccatggcccccacaccgccccagggtgaggttgacgccgactgcatggacgtcaatgtccgcgggcctggtaagggtgccagcagccagggcttccctagccccgtggcccacctgcctctctcccctaagccccgaggctggggtacagttgatactctggaaacttagaattgggggtgagagctttcatccttggggtgtttcccattcagagtagacgtgggggggtcctggagtcctcctgttcttccaccaaccccttcctggggtgataccgcagggccactctgtccctgtaaattactcttttctgaaaccttcttgagacatggaaagcgttgattttctttttctttttttttttcttttttttttgtttttgagatggagtctcgctccgtcacccaggctggagtgcagtggcacgatctcggctccctgcaacctccacctctcgggttcaagcaattctcctgcctcagcctccccagtagctgggactacaggcgcctgccaccacacctggctaatttttgtatttttagcagcgatggggtttcaccatgttggccaggctggtctcgaactcctgacctcaggtgatccgcccacctcggcctcccccagtgctaggatgacagcgtgagcctccgcatcctgctgaagcattaattttctaactgcatgcttctggggtcctctttttcctgggtggattttgggtgccaggtcttgggcaggtcaggaagcagttgcccgccaggagtttaagctggattcggctctgtccactgagcagcccaggcggacttcagctgccccttggtggctgtgtgcacggggccaccaagtgctgggtggtgcatccacaccgtggccccttgagcttggggctgctgcccccctccccctgggctgcagctggggaccggccctccagactgagcacccgtctctgcctctgcagatggcttcaccccgctcatgatcgcctcctgcagcgggggcggcctggagacgggcaacagcgaggaagaggaggacgcgccggccgtcatctccgacttcatctaccagggcgccagcctgcacaaccagacagaccgcacgggcgagaccgccttgcacctggccgcccgctactcacgctctgatgccgccaagcgcctgctggaggccagcgcagatgccaacatccaggacaacatgggccgcaccccgctgcatgcggctgtgtctgccgacgcacaaggtgtcttccaggtaggcagtggctgcctgtgtgcccacctgccctcctcagggccgcctggtggtctggggcagtggccaggcttacgtggccctgggagcctgaccccgagcacagctgagtccgggacaactggtgcctccacctgggaccttcgcagtcagcgaggtgcgagggggagggcgtcgggcccatctgtgttctccagggaagtcaggcagaggcgggtctggcaggaggcctgggggatctgctgagtgaggcagcacctccccacccccagcaaaacaggctccatcagggttgtgggccttgctcaaggtccaggttccactgctgcagcccctcgcagccccgcccctccctcaaccttggctgccggcgtagcctgtggcagtgagaagcagggtttagaggctgccgctcggtgcctgcagacctagggctcagcttgccggtgagctcgtggcaagaatggatttagggatttggatgcctgggtctccagggagtgtccctggcaggggctgcctttgcagtcacccctgctgcgagtccccaggctccaggcggccctggagcaagcaggttcagatgggcacagcccggggagttaccacagagcttctcatttcctgatttcttagctcaggtgacacattgtcatctcgcagaaataaatgtaggtgagcagaaagagcgtggaagggagccccgtgcgggtttggtgtgtgcctctctcagctgccttctttgcacagatgtggaagttcccaggtgctttgcaggaatcaggccaagttgccttttgcacccgccagtgagcaggggccattcctcctgccagatgccaagacccggctgcattacaagggctgcccaccccctctctgggcagagccggacactagctcggcggttctgagacggctgtagggccgtgagcccggcttcctgagtgccagctgtaaccgccgttgggggcagggacttgacctctctgttttgtaggtggtcatggcagctaggaccacagtgaggattaaatgaggccacacgtggtcacgatggatcccactgtcaccaaggggcctgtctgtgggcagcacagcccctgcccccatccgggcccctcctcaggggcagccccatggcgtttcgtcttgcccggccgtgccgatctcaggagggtctcgtctgtgtccggaagacagtggggcttcccgtccaggcgttcgttctgggcaggaggcatcggtgtacgtctgcccagcacccgcctgagcctctccctgttgcccagatcctgatccggaaccgagccacagacctggatgcccgcatgcatgatggcacgacgccactgatcctggctgcccgcctggccgtggagggcatgctggaggacctcatcaactcacacgccgacgtcaacgccgtagatgacctgggtgagcccacgggggcacggctgctctgtcgtggggcgggaccgccacagggacgggtgggactgggttgcctccagctggtctccaacctaccccatctgcttctttcacgcaggcaagtccgccctgcactgggccgccgccgtgaacaatgtggatgccgcagttgtgctcctgaagaacggggctaacaaagatatgcagaacaacagggtgagcgcgaggctgggatgccaggggagacgtgagggctgaatccacagagaagtgagggccaaacccacggggcgcagggacacaagggcctgacccacagggtctcgagggtcgctgggcccgcatgtgggccccacccgcatgatgcgggcacctcgttagtgctcctgccttccttcagcccccgtttatggagcccttccaagtgcaggtccagctgtcaggacacggcggctcgcccctcagacccagccctaccctcctgggcggcagtcatggcggggcacacagcctggcgtggggaacgctgctgctgccactgctgtgtcaccgtcacctggacctcaccttctgtccccagctgtcaccaggcgggggtggggatgggaatgtggtgacgcaggtggtgcagattgagccagaacacgcgtggcggcagctccctgcggggcggggcctcttggtgtgttcaccaaggccaaggacctcaaggctcagaggaagaagtctcaggactatatccaaggggagccacccccagccctcatcctggccctgcagctcctggccctgcagctgctgttggtttcccctgggtgctcagggcacaggtgcagacacccccacctccctgccgccagaacccccacccccgcccccaactcctgctgcccccttggcatgtcaggctcaggcgtctctccctcctgggtgagggcacacagcgggcctgggcaccggggcatgttggcccaggcgctccccagtccgtggcagcatggccccacagagactgggccccagagggcatcaaggcctgggaagccccttcccactcccacacagcagcctcacccagacctgtgacgtgtccaccgcacagaggagaccccaggaaggagcttggtggccaccagggtggcttgatggccgtccagatgacgagctccctccctggtgccctcgccggtgcctctgaaccgctccaggaatttccttttgtgccttattgggggcagggaagagggcctgcagttggttagattttcagtggggtctgtgacccccccatagaggtggagccccgctgatctagggtagaggactgcacagatcccctctctgggtgggtttcagaagatgtatcaaagccttaacatttaacaagagtcaggctaggtggttgcaggacgctggggtggggtcctgaggagcagcctgcctgcccccaccccgcggaggaggttgtactgctgcttcctctggtgatggaaccttggggagggtccccacgcctggcctggcccccctcaccggcccccgccctcatcccccaggaggagacacccctgtttctggccgcccgggagggcagctacgagaccgccaaggtgctgctggaccactttgccaaccgggacatcacggatcatatggaccgcctgccgcgcgacatcgcacaggagcgcatgcatcacgacatcgtgaggctgctggacgagtacaacctggtgcgcagcccgcagctgcacggagccccgctggggggcacgcccaccctgtcgcccccgctctgctcgcccaacggctacctgggcagcctcaagcccggcgtgcagggcaagaaggtccgcaagcccagcagcaaaggcctggcctgtggaagcaaggaggccaaggacctcaaggcacggaggaagaagtcccaggacggcaagggctgcctgctggacagctccggcatgctctcgcccgtggactccctggagtcaccccatggctacctgtcagacgtggcctcgccgccactgctgccctccccgttccagcagtctccgtccgtgcccctcaaccacctgcctgggatgcccgacacccacctgggcatcgggcacctgaacgtggcggccaagcccgagatggcggcgctgggtgggggcggccggctggcctttgagactggcccacctcgtctctcccacctgcctgtggcctctggcaccagcaccgtcctgggctccagcagcggaggggccctgaatttcactgtgggcgggtccaccagtttgaatggtcaatgcgagtggctgtcccggctgcagagcggcatggtgccgaaccaatacaaccctctgcgggggagtgtggcaccaggccccctgagcacacaggccccctccctgcagcatggcatggtaggcccgctgcacagtagccttgctgccagcgccctgtcccagatgatgagctaccagggcctgcccagcacccggctggccacccagcctcacctggtgcagacccagcaggtgcagccacaaaacttacagatgcagcagcagaacctgcagccagcaaacatccagcagcagcaaagcctgcagccgccaccaccaccaccacagccgcaccttggcgtgagctcagcagccagcggccacctgggccggagcttcctgagtggagagccgagccaggcagacgtgcagccactgggccccagcagcctggcggtgcacactattctgccccaggagagccccgccctgcccacgtcgctgccatcctcgctggtcccacccgtgaccgcagcccagttcctgacgcccccctcgcagcacagctactcctcgcctgtggacaacacccccagccaccagctacaggtgcctgagcaccccttcctcaccccgtcccctgagtcccctgaccagtggtccagctcgtccccgcattccaacgtctccgactggtccgagggcgtctccagccctcccaccagcatgcagtcccagatcgcccgcattccggaggccttcaagtaaacggcgcgccccacgagaccccggcttcctttcccaagccttcgggcgtctgtgtgcgctctgtggatgccagggccgaccagaggagcctttttaaaacacatgtttttatacaaaataagaacgaggattttaattttttttagtatttatttatgtacttttattttacacagaaacactgcctttttatttatatgtactgttttatctggccccaggtagaaacttttatctattctgagaaaacaagcaagttctgagagccagggttttcctacgtaggatgaaaagattcttctgtgtttataaaatataaacaaagattcatgatttataaatgccatttatttattgattccttttttcaaaatccaaaaagaaatgatgttggagaagggaagttgaacgagcatagtccaaaaagctcctggggcgtccaggccgcgccctttccccgacgcccacccaaccccaagccagcccggccgctccaccagcatcacctgcctgttaggagaagctgcatccagaggcaaacggaggcaaagctggctcaccttccgcacgcggattaatttgcatctgaaataggaaacaagtgaaagcatatgggttagatgttgccatgtgttttagatggtttcttgcaagcatgcttgtgaaaatgtgttctcggagtgtgtatgccaagagtgcacccatggtaccaatcatgaatctttgtttcaggttcagtattatgtagttgttcgttggttatacaagttcttggtccctccagaaccaccccggccccctgcccgttcttgaaatgtaggcatcatgcatgtcaaacatgagatgtgtggactgtggcacttgcctgggtcacacacggaggcatcctacccttttctggggaaagacactgcctgggctgaccccggtggcggccccagcacctcagcctgcacagtgtcccccaggttccgaagaagatgctccagcaacacagcctgggccccagctcgcgggacccgaccccccgtgggctcccgtgttttgtaggagacttgccagagccgggcacattgagctgtgcaacgccgtgggctgcgtcctttggtcctgtccccgcagccctggcagggggcatgcggtcgggcaggggctggagggaggcgggggctgcccttgggccacccctcctagtttgggaggagcagatttttgcaataccaagtatagcctatggcagaaaaaatgtctgtaaatatgtttttaaaggtggattttgtttaaaaaatcttaatgaatgagtctgttgtgtgtcatgccagtgagggacgtcagacttggctcagctcggggagccttagccgcccatgcactggggacgctccgctgccgtgccgcctgcactcctcagggcagcctcccccggctctacgggggccgcgtggtgccatccccagggggcatgaccagatgcgtcccaagatgttgatttttactgtgttttataaaatagagtgtagtttacagaaaaagactttaaaagtgatctacatgaggaactgtagatgatgtatttttttcatcttttttgttaactgatttgcaataaaaatgatactgatggtga

SEQ ID NO: 22 - DNA, 35839 bp, Homo sapiens
cgcccctccctttctgcgactggctgttaggcgtgggtctccgccccacagccctgcgcctgcgcgtgggcctgggccgcccgtcgtacctgatggtaggaggcagtagttccccgcttcccttccgcgggagggagagttaggtaagccccgctggacgccctcggcgtctcgcctcacgaggtgcaagctacccccgcgaattgccgaagcagccctgagccttggcgccccgacccgccggcgctcgccgtcagctcagcgccactcttccggcgtgccctgatggacagaccccctttcggatccgagttttcgcctctgtcccccagttttcccttgtcttcaactcccatgctctttgatcctgcctctcagctggttcctcgctgcccacgcttgcgccggcgtaggctcgggcagaatcccgagggacccgggttggggtggggctgccggtgaaggtgcggcgatgcccgcgaaggctcctctgggtgccgctcggaagagccttctctccgctgcggtgcgtagcgaggtgggccgggtcatgcccgtggcacttctgcaggcgtcctgggggcacgccagggcctaaccggtgctggttccctctttgcttactctggttccttcattcattcagcaaacatttgagtttgggtcctgctcactgtattacatccacatctgctgctggcagctgcgattccgagggtggctcagaaaaatcgctgaagggctatctgttgagagaatggattcctgatccccttgccctccctcaatcagcttaagatagaatctatgggaaactttccctttgtcccttcttgccatccgtttgcttttcatgcctagtgtatttccttataccagagagatggctgtagcgcatgggaccttggaccacctcacctgtttgccgtgtttccttatcagtaaaatatctgcctttgaaaagcattgggtgaattaaatgagagctattaggataaggcccaggttcgcctttctgcttttctcactagtgggcgcccctccgcccacgcgcgcgcgcgcgtgtgcgtgtgtgtgtatagtatttttttttctgagatatttctattttctggaatattctccataatgtaacatattgactgttactttaaattaataaagtccttgtttagcagtacaattagtcagctctcaggtaatttaaatacgtgtattttagagacggtaatttttttttcctccttccgttcgtgctctacttttggttggaatttaacacctgtaacagacgttgtcatcttggtatttctgaagcattgggatcccttggtttagtgtggtgctctttgaactcttgattccactggccaccatttgagtattggaatgtgcacttggtgtcatttggcatttgctagaagatgtgaactactgtaatgttagacaagagtaaaaaaaaataccaacaattcagcctaagtatatttgtggagttgttggaattataacctatgcattctagaaaccgcataaataaactttggttataattgcaacaggcagtagataatttaatccacacagttgatttcatctctttgatattggccaaaaaagtttaaatgaattgctttattggtcctaggacatgacccttttgcagaaaccagtcacaatatttaagaaattagtaaatttgttctttttaggctctgagagatgtttgtaccatattaagaaaatcaaaggtagaatagaaagctaagtctgtatgtgcatctacacgtctgcatcttttgtgttttgaaacaaatacattgctcatagaaaattgactttatgacctatttttaggggtcaaaacatttaagacaatggaaaaagtcgttattgcatatgctcttcttttcttgttttttgttagctagccatccaagaaaacaccatgaaagataacgatatcaagagactactgtatacccatcttttatgcatattttcaattatcctaagtgtcttcattccatcactcttcttggagaacttctcaatattggaaacacacttgacatggttgtgcatctgttctggttttgtaactgctgtcaatctagtactatatttagtagtgaaaccaaatacatcctctaaaagaagttcattatcacacaaggtaaggcttatgtctcaataactgatttttggatggagctagtgtttcttttaatggaagaataaagtattcatcaagtctttattagcttatttatagtgagcaaagggaacctgatatttttccccccaaattggtaggctgttacttggtggaaggctgcccacaatgtttgattgatccttgccttgcattaattatggaattatgacttcttcagagcatattataatattgtgagcctatatagtcattgttttatgtcaccattgaaaataaatacgtgtgacagtctatctttaaaccttactcaataagacattgcagtttatttttattatttttgcatttctgaaagccacttagtgggattttcagaaattgcaatataagcctgtggtaatgcttgtttccaacatggccttccttgactaaacaattttcagatattagaatcaattttccagaatattcactgcagtagatattcacttggctattactaataatgtccacacttaacattattttctaccatgtataagctctgttaggtcatttactgcctatgattggaaaagctgaatgtatgtgttatgtttatatattcttaagctccaaatcaagaagatctcatgtttctttgtagatgttcaggtcttttttcatacgggttgtgtaatatgagtgtgatttcaagaattatttagtattttgctttttcagtgcagttttcccaggaattttgttttaaaatgaaaaaaattgttattttctgcagatatttcctctatcatcgcataatactgtattttttgtatcctagctctctgatgtcaatcagtatttgataaatattgattaatgacatagctctatattaccatggaaacagaacctcttttcgactcatgtaggtcggatgggtagaatatgggcggaaggtggtatttgccttttaggcttttttagtctgtatcgaaggctgtgtatgtgacggtacaggacatgtgatctgatttgagtatacccaagaacatttgaactgttttacacattatgggaacaagttgtgtttgtagatgaaatggaagaatttattgtcctttaagcattatcttgaatcttcaggttattcatttctcttttaggtaactggatttttgaaatgctgtatctactttcttatgtcttgtttctcctttcatgtaatttttgttctgtatggagcaccactgatagagtaagtttgaaatttttaccctaaatttatattttaaaacattcatttaccaaactgtgtgctaattcttagcaactagagaaaaaccatgatgtgcatcattaatagatcaagtaaggacaccaacatcattagcagtgttattcttttttaaaaaaaacagcagaataacttaatttattaaatactcttgttacctagccttctagtatccaattgcatgttgagagaagggagagtagagaaactatactataccaataagtatttggcccttagaacctctgaaagaacttactatgattatatgtgtaagttataattagcatatcagttcttataaatgtgattctaaagtacttgaatggagtttttcttaacaaaagtcaatagattcctgtattcaaatactgaataagctggtgtttatagtttaaaggtaaaatttaacactttttctgaactgacaaatttcaaattcttagaaacaaaattcatgaatgtttcttacataatgtttatcatagtttgagaagcttcagtttagcagtgattaatgatcatggtgaaatgagtgatgagatacatatacatatacacacacatatatttgtgttgctaagtataccattttatatatatatatatatttatacatagttttacgtacacacactaaactgacaggttattcttttctagatgggagagaacaagacctttgtaatggaaaatggtggttcctgtctaatccattttaaagcagaatgaatgtgtctggcacagtggttctcaaaatgtggttttcaaaccagcagcatcagcattttatcaaaatgcaaatactcaagcttcagtcagaaactctaggggtagagcccccaccaatctttagtttatccagctctccaggtgtttccaatatatgttaaccactagttgtagagaaccactacaactagtattcaatagtggttcaatagtggttcaatagtgtattgaaccactagttgtagagaaagttccagagagactattgagcagaaagctaactatctagaaatggattttgtttgtttgtttgtgtttgcagtgaaagtctcagcatggatcctagggtctttaacacttctgaaatctatcattaaagcgaaatacttgctagattgttttttaaagctacatgttggtggtaaaattatttatagtcatcattttggtggcattcatgttacctttcaaagtaaagcataggaagatatttcacattttatttatataataaagattatgtatgtgtatgtttacctttaacacttttttaaaaagtaatctttttttttttctaggttggcattggaaacatttttatttgcagttattttgtctacttttactactgtgccttgcttatgtttgttaggaccaaacctcaaagcatggctaagagtgttcagtagaaatgggtaagttttaattttatattataatgatattgaaattaaaaaataattaatgaagtatttttctattcatggcagtttgctgattattctgagtgcttctcattgctgatggtgctcagagatgccttaaggggtcactgcaattagggactggggacagggcaggcagaactacaagcccctccctccacgttagcaagatcagctctccttttttctgtatggtagaattccacctagccttttgtttgtttaaaaaaaaaaagaagaagaagaaataaaaaaaaattctactattaaaagaaagccttgaaaaccatggttctgggataatttggcactgtgataagactgctgtaaataaaattgcttacatacattttataaggtagaagtggggtccacaatctaaaaatgtgttgtgtaacaatgataatttcttgtttagccttttttgtgataagataccagagctcaagttttatgagatttcatttccttggtggccgtatatattttcagcatggctaagttaaaattttagcttcttgaaagtcatttaaatgatatgcaccagaaatagtggagatctagctaagaaagccagaaggttatttgattctttcctatttatcacccagcagcaagaacttcttgagcacttagtctgtgctctgtgttattgtgttatgctaagctgtgtgtggtttctgaagtattaggaggaatctttttttttttttttgagatggaacctcgctctgtcgccaggctggagtgcagtggcatgatttcggctcactgcaacctccatctcccaggttcaagtgattctcctgcctcagcctcccaagtagctgggactacaggtgcatgccaccatgcccagctaatttttctatttttagtagagacagggtttcaccacactggccaggatggtcttgatctcgacctcatgatccgcccgcctcgcctcccaaagtgctgggattacaggtatgagccaccacacccggccttattaggaggattcttttgctgaggagcttatctgttcaagggacaaaaatgagcaaataacatcagattacaaatgtgtaaatccagcaataagtggtgtaggaactcaaagggacagagcatcagtaaagaatggagggggagatgggaatgatctatgatggacttaagtcaagagtatatgatttggtgagaccaagaaggaagagaaaggcacctcgtgcaaggagaatggataaaagcattgaaactgaaatgaacagggtatttttgtgtgatttgaaaggtaacagcccaatgagagcaaaagatgcatgctgagtagcttggcttcataaattaccgacttattccctttgaaatcagtactgtttgggacgagtgtggtggctcacgcctgtaatctcagcactttgggaggccaaggcgggtggatcacctgaggtcaggagttcaagaccagcctggccaacatggtgaaaccccatctctactaaaaatacaaaaattagctgggtgtggtggcgggtgcctgtagtcccagctacttgggaagctgaggcaggagaattgcttgaacccaggaggcggaggttgcagtgagccgagatcgcaccactggactccagcctgggcaacatagtgagaatctgtctcaaaaaaaaaaaaaaaaaaaaaggaatcagtactgttttcccttggaaccgtcttctaatattcataaagtctctagaaaacagaagtgtaacaactgaaagcattttctacattattaccataatatcccaaatggtattaattgcttttagccttttagtttgaaatttttaaatagtgaaattggattgaaatcttattactttggattagtgatttctccagttttcaagtctatgtctaataatgggtgtatttgggggaaatactgtcatgtgattttacaattagttctgctataatgtggcctgtgtgttcctaaaaatcactacgctgtacaaaatgggcagtaaaaaccacagagcttatgggaaagatggggttaggtcataacactaaaacaattcatcagtgacatgtagagagaagatgggaacttaataaaaatggtagcacagttttacacgtttaaaatggttacaaaatacaggcatacctcattttattgttcctcactttattgtacttctcagatattgctcagatcagatactgttttttataaattgaaggtttgtggcaaccctgcatcaagcaaatgtatcagcgccgtttttccaacagcatgtgttctcttcattggaaactctcacaatatttcaagctttttcattattattatatctattatggtgatctgtggtctttgctgttactttttgtaattgttttggggcaccatggctcatacccatataagatgacgatcttaataaatgttgtacatcttctgactgcttcacctaccaacgtgttctctctgtctctctcccttccccaccctccctctctctcccgtccctgttccctgagatacaaaaatatcaaatttaggccagttaataaccatactatggtctcttaagtgttcaagtgaaaggaaaattttacttgtctctcactttaaatcaaaagctagaagtgattaagcttaatgaaaaagttaagttgtcaagaactgagacagactaaaagtgaagccccttgtgccaaatagccaagttgtgaatgcaaaggaaaagttcttaaaggaaatttagtctactctagtaaacacatgagtgacaagaaagtggaacagccttactgctgatggggagaaagttttatggtctggatgaaagatcaaaccaggtacaacattctaagccaaatcctaatccagagtaagcctctcactctcttcatttctgtgaaggctgagagaggtgagaaagttacagaagaaaagtttgaaactagcagtggttgattcatgaggcttaaggaaagaggccatcgccatcacataaaagtgcaaggtgaagcaacaagtgctgatgtagaagctggagcaagttatccagaagatctagctaagattgttggtgaaggtggctaaataacagatttttaatgtagacaaaacagccttctattgaaagaagatgccatctaggacttttaaagttagagaggagaagtcagtggccaccttcaatgcttgacaggctgactctcttgttaggggccagtgcagccagagactttagttgaagtcaatgctaatttaccattttgcaaatcctagggcccttaagaattatgctaaatctactttgcctatatactgtcaatggaacaacgaagtctggatgacagcacatctgtttataacatggtttactgaatattttaagctcacttttgagacctactgctcagaaaaaaaaaatcctttcaaaatattgctgctcattgacaatgtgcctagtcacccaagagctctgttggagatgtacaagaatattaatgtttttttcatgcctacaacacaagatccattctgtagcccacggatcaaggagtaattttgattttcaagtcttattacttaagaaacacattttgtaaggctatagctgccatagatagtgattcctctgatggatttggaaaaagtaaattgaaaaccttctggaaaggaccattctagatggatgccattgaggacatttgtgattcaagggaggagataaaaatatcaacattgacgagaagctgattccattcctcatgaatgatgttgagaggttcaggacttcagtggaggaaaccactgcagatgtggtggaaatagccagagaactagaattagaacaggagcctgaagatgtgactgaattgctgcaacattatgataaaactggaacagatgaggaattacttctggatgagaaagaaaatggtctcctgagatggaatctactggtgaagatgccatgaatattgttgaaatgacaacaaaggatttaggatattgcataaacttagttaataaagcaaagcaatggcagggtttgagagggttgactccaattttgaaagaaggtctactctgggtaaaaggctgtcaaacagcatggcacgctacagatcaatcttttctggaaggaagagtcaattgatgcaaccaacttcatggttaaaatttcactttaagaaattgccggctgggcgcagtgggtcgtgcctgtaatcccagcactttgggaggctgagacaggcagatcacttgaggtcaggagtttgagaccagcctggccaacatggtgaaactctgtctctactaaaaatacaagaaaaattagctgggcgtgctggtaggcccctgtaatcccagctacttgggaggctgaggcacaagaatcacttgaacccaggaggcagaggttgcagcgagccgagattgtgccactgcactccagcctgggcgatagagcgagactcagtcttaaaaaaaaaaaagaaaagaaatttccacagcctccccaaccaccaccctgatcagtcagcagccgtcaacatcaaggccacatcttccaccagcaaaaagattacaacttgctgaaggctcagataattattaacatttcttagtaataaagtatttttaaatcatgtgcatttaaaaaactaatgctattgcccacttaatagactatgatacagtagaaatataacttttatatgcactgggaaaccagaaaatacatatgactcactttattgtacaatttgctttattctggtggtctggaaccaaatctgcagtatctaaaaggtatgcctgcacccaaatattacaataaacatagcacttttccttggaaaaggtttccttggtaaaggtttgcttctggaaatagacatgagaagggttgcctattgtgagttattgcgaagtgatgagatggttgttggaaatctgagggaaaattaacaccagatgtgcgtatgtgtggctcatgacacgtagtaaactgaggtagctgggaggtggttattttttaaaacagtattgagatataattcacacaccgtacacatcatctatttaaaatatacaattcaatgactttttgcaaccaccaatctacttactgtctctatagatttgcctatcctggaaatttgttataaattgggtcttatgtgatcttttgtgactgcctttttttacttagcataatgttttcaaggtttatctatgttgtagcatgcttcagtacttcattcctttttgtggctgaataatattccattgtatggatatatatcaaattttgtttacccatttatcagttgatggacatctaggttctttccacattttgcattttggttgttgtgaataagctgcatcaaacatttgtgtataggtttttttatggacatatgtgtttatttatcttgggtatgccttggagcgggattgctgggtcacatggtagtgttaagggtttgagaagcaagctccagtgttcaaactctgtaaagtgcagtttggtactatctgtaaaaattacaaatatacttcttcgacccagcaattctacttcttggattttaaccagtaggtatacttgcacacttacaaaatgttgaatatataagattactcatttcagcattgaaaattacctaaatatcctttaataagggatagggttaggataaatttaacccacactgtgaagtactatgcatttgtaaaaactaaacacataaaaacagaaaaaaaccccaaaacaaaactctttatttaccgataagttagtggaaaaaagcaaggtgaaaaaatgtgtacaggatgctaccatttatgtcaaaagttgtcagagggcacagatacacgtatatttctggaaggatatgtgagaaactgataaaacctgttgtctcttgcgaggggatctgagaagctagaggacaaagtaaggagactttccactgaatatcctttgctatcttttgaaatttgaaccacattagtgtactacctagtcaaaataaaagttataatgagttagagtttgccagtacttaactttcttcttgcttatggaaagtaggcttatgtcaggaaattgctagatttctctgatgtcacctaaacttcagtagactgcaaaagttgtcctaaaatttccaacatactggagaacagcctagtctccagaggactatggctaaaaattatcaatttataatgtgaaacattttatataatatcacatagcacatgacatgaaatagcaatgcaaaaatattttaataacttttaaagcattttcattatagagtttctcagagcaatctagtgagatactcactttcaccattttctagatgaagaacttagaaagctgacaggttaagtgatttgccccagttctgtagccaggaagtagtagagctgggattggaatctagatcattagatggtgtagaagttagacgactccagtaattgaggatcagaaaacaggttcttgccctgtttttactacttagcggccaagtgatcttagacaagctacttaacttcacatatgtaatatgattagaataaaactaatatgtactttgcagggctgtgtcagaactgagtgaaatgaatgaaatcaaataataggttcttaagaaatgtttgttgaatggattaaaaaatgtcagggagcattttatatatcatactttcagtccttactgcaatttgtctcagtatttcttcctagtttaggtgacagaccaaggagcacagtgcatagataactatggaggagggctggttttttcatttaatttaatgtgaagttaatttgaactttgacgtaagagaagaatctaagtctttatgtttccaccatacactagagttagttcacttcttcttagtacttttattatacttccaaattttactatagaaagcatgtcaaattttgaataagctaggaaataattagattaactcgttgaacattagagtttgccttcttaaatgttcacttttaagcaaaaatatttaaaaactcaaagatctatggttttgcagtgataatataaatattcacaaagaattactagttatattgaaattgctccaatatgtagttagcattattcatattgaatcacaactttattttttaatttttatttttttgtgtctacatagtagatatatacatttctggagtacatgagatattttgatacagacacacaatgcataataatcacatcagggtattcacatcaagcatttatcttttgtatgtatggttgtacaagcaatccaattatactcttagttatttttaaatgtacagttaaattattattgactatagtcaccctgttttgctatcaaatactagatcttactcattctatctttttcatgcccattaatcacattctctgcaccccccacccccactactacccttcccagcctgtggtaaccatccttctactctctatctccatgagttcaattgtttttttaactaccacaaataagtgagaacatgcgaagtttgcctttctgttcctggcttatttcatttaacataatgacctccagttctgtccacattgttgcaaatggcaggaactcattctttttttaatggccaagtggtactccactgcatgtatgtatcactttttttttttaatccattagtctgttgatagacacttaggttgcttccaaatcttggctattgtgattagtgatgcaataaacatgggagtccagctatctcttcaatatactgatttcctttcttttgggtatatacctagcaatgtgattgctggatcatatggtagatctgtttttgtttttttgagaactgatctccataatggttgtactgatttacattcccaccaacagtatgtgagagttccctttctccacatcctcgccagcatttgttattgcctgccttttggataaaagccattttaactggggtgagatgataatctcattgtagtattgatttgcatttctctgacgaccagtgatattgagcaccttttcatatacctgtttaccacttgtatgtctttttttgagaaatgtctattcagatcttttgcccatttgtaaattggattattaggggttttttttccctgtagagttgtttgagctctctatatagtctggttattaaccctttgttagatagatagattggaaatattttcttccattctgtgggttgtctcttcactttcttgattgtttcttttgctgtacagaagctttttaacttgatgtgattccatttgtccatttatgctttggttgcctgtgcttgtggggtattattcaagaaatcttagcccaatccagtgtcctggaaagtttccccaatgtttccttttagtagtttcatagtttgtggtcttaaatttaagtctttaatccatcttggtttgatttttgtatatggcgagagttaggggtctagtttcattcttctgcgtatggatatccagttttcctgccaccacttatggaagagactgctctttccccggtgtatgttcttggcatctttgatgaaatgagctcactgtagatgtatggatttacttctgggttctctatttgttctattggtctatgtgcctgtttttatgccagtaccttgctgttttggttacagtagctctgtagtataatttgagtcaagtaatgtgattcttccagttctgttctttttgctcaggatagctttggctattctgggtctttgtggttccatataaattttaggattgtttcttctatttatgtgaagaatagtgttggtattttgatagggattgcattgaatctgtggattgctttgggtagtatggacattttaacaatattgattcttccagttcacaaacatgaaatatctttccattttttgtgtcctcttcaatttctttcatcagtgttttatagttttcattgtagatatatttcacttctttggtgaagttaattcatagatatttaattttatttgtagctgttataaatgggattacttttttatttctttttcagattatttgctgttggcatatagaaatgctactgatttttgtatgttgattttgtatcctgcaactttattcaatttgtttatcagttctaatagtttttggtagtctttaggtttttccaaatacacgattatatcatctgcaaacaaggataatttgacttctttctttccaatttggatgccctttatttttttctctcatctgattgctctagctaggacttcctgagtcacaactttaatttcaaagaattctattattattcaaggagattgtacaaaatacatgaatagtacatgctttttcctactcaataataatttagaacagaaattaaaatttcaatttgaagttcttatgctgtagttctaattaataaaaagtatttaaaataccttgaagtgtcaactgaagattttagagctttaaatatttttatcattcatcctgtattttaatatgtaaaacacagtagagttttgtgtgtattttttttaacttaaagacagcccttttagtattattaaaatgtgaataattcagatgttcagtgtgaacaggctaattttgaattggcatgatatctcaattagtgttgaatcaatataaatgttgtataatatttttaagtgaaataagtttatatactagtttttaatgtatttatttgcatgtttgtagaaaacttatgttgaacacatgatagtcatgtgacgacagagaacaacaaagctttgagcttgtgaactgtataggaactacatcctacaagttaaggatcaattctgatactattgggattttatacataactaaaagacactattttaacaggatttctccttacagtaaatgttaagttactccaggaaaacaaaacaaaagaatactattataaagaaacttggaagtagacaaggtcatttggtttcttaaaatattctgccagcttcttattggtatacttattaaataatatactcagtttgtactaatttaattcagttattgcattggcattaaaattattttttttttcatttgcagactttcttataaaggaaagtaataatctgactactatacacccatatagttcattgaaacttgttttttgacatatcagttcttttatgctgttatttgaatgtttaagttagaagttgatcacttttggtgaactaaatagattcctgaatagtactaaacaaaaatcttgccaagagtagtgatctagccgaggtgaaaacattcaataagacctatttgtgtagacaaagataataggcctctttttgtcatctttgtattgaaatagattttatattgaagcaaccactgtggacactaagagtgaaaatatagtgagtgaccaaagatttactcatataaaaagtagataatttagtataaatgtgggcaaaaaatttagtggcaaagaggcatttgttttaatattcagtggggaaggaaaacatttatattagaattttgtaaaatacctttagccactaggaggagttgtacagtgtctcttttttagatgaagagactagcagttcaaaaaattaaatctatttaaacaaacactattttgatgacagtgtatttaaaccatgagtgtttactatgaactaccctcaggtgtctgatacagtgtctggcacgtagtaggcactcaaaatggcctgtttacttcaattaatatttgatgtaatgaattccagtggagtcaaataatttggacaaatagttggagcacagtgtcatgaaggctggcctgtaacattgctgtagtcactttttaagtttgttcacaggggagccatttatttattctgagccctattgactgtgcatatattccttaactttgaaaaaattagccaataaccgtagaattcaaatagctttattatggaaacttacaaaatgagagtacatcaatgtcagtgatgctagaaattagttaatagaaaggaatttacctattttattctttttatcttatttattacaaaataatgtatataaatgtttgtagtaaaaattcaaacagaaaaatatagaaagttaaagatcctagtaatgctatcatggaagcaatgaacaactagcagattttatatgttcttcgaattttgtattaattatatatatataattttaaaacaaaatagttaaactagtcatggctttataacttttttcccactaatgtgttatgaacatcgttatctgtgtgtgtgtataatctacctcttcttacatagtattcttagctactgtatctctataagtaacataaaacttcagcttatattggtttgaataataaggaaactgattatgtcacataacggaaattggatggttctagacacagatagtcatggtatggttgtgcttcttactgattctccttgttattatcctcaggctggtagtgggatggcagcagtttctcttccttgagttttcctaatcattgagaaacagaatgggatcatcaatagttaattaattagtctcatcatcagggttgagatgaatgttgagcaattaatcatcattacaagtattccatgtaccatgatttatttaactaatttcctattaaggtttaatatcaaattttcatgataataaataatgttgttaggtatatctttgttccatataattttgtatacttgtgcaaaggtttttgtagactagattacttgagtaacattcctagatcaaaggaagttaacagacactgtcaaactaaagttataatttgaagaatatgtatatacccccatacatattcctaccaatagagtgtaggtttccctgactccccatcaggcctctttacctcttatcaatctaccagggctgctacctacagggatctgctaagggggcagactgtgcactatagtagcttcatctgatttctaagaggaggcgtaagccttggccatgaatttttaagtctcaattatagaaccaccatttattaaatttcagtggaatattactaactgaatcacagagatagcatttatcttacccagcctccctacctccattctctttcctgcctcatgttacagaaaacttattagaaaataacatccagtcctcaaaaggcagcttcaagacagggaaaattggggctagttaagataggatgtgtgcccatgtgaagtgtgagcaagagaaaagaaacggcatgacaaccctaaaaatgcactatagaagaaggaaaaggggtgtgcagaagatgaagaatctggcctgaaagaaagtgctaccctagaagcaaaaataaacaaaaaaacctccacacagtttaccatgaaaaatagtactaaggatatgaattgaataaattaagagcaaagatgagatcatgaaacaaaatgacgtggagaagaagattgcagaattagtgaaataaattgagaatgcaaaggtcactattacaggacataaattaaaaatatcaagaaacagacaaattagaaagtcaggttttagcatggaagaaaggtttgagctaatcaaaatgaatgcggggtagggagggggttgggaagaataaagcatttagagaagatgtgataaatatagaggagaaatgaaagggatgcaaacaagactagttagtgcctctaaaatacccaacaaaaaatgattcaaagatgtgatagaagacagttttcacaaatgaagggattctccagtttgtacatcaaagggactcactatatcaagaaaataattgaatgaattggagttgtagaacaatgtaaataaaaactaatacaagcaatggaagttgaacagtgcagggaggagaagtgaagaaaatataattgtacccttcatatcccagctattctagctgtccccagatactgagcctgttgggtacaatctctttggggaataagttttaaacgaaatcctacatctcaaaccatgagttcccaccttacacctagcccctttcccctggttggcccaaagtactgggagccaggcttataccatctaggcagaatattgaaatatttctttcgagggaaaatggtactgacattttgggattctctaaaggaaagtcaggttcctaccccgtccctagttctgtgcatccccgtgcttgaattataagcatccagtcagctgttttaatgtttcattttgttgttgctgttgtttaaaaatagtgttattgagatataactgtataccatagaattcactcaaagtgtataattcagtggtttttagtataggcacagttgtacagccattgccacaatctaattttgggacatttcaccacatcaaaaagaagctataactattagcagtcataccctattcccactcttctctccatggcccaggcaaccactacaggagtgtccaatctttgggcttctctgggccgcattggaaggaaagaattgtcttgagccacacatgcaatacattaacactcacgatagctgatgagctaaaaaaaaaaaaaaaaaaaaaaaatctcataatgttttaagaaagtttatgaatttgtgttgggccacattcaaagccatcctgggccacatgtggcctatgggccgtgggttagagaagcttacactaatatattttctatctctgtagatttgcctagtctggacattacatacatggtgttttaagtagaatgagaagtaaagaatcaccagatatttgaggaatacgtcaaataaaatccagaaatgaaaacaacaaaaaagaaactcaggggaaatagaggcagtatataaagacagaagataacttaaaaacttactttttttttttaaagtttaccataaaaggtgaacaggaggcagtcaaaatgcatattcagagaacaagaaaacttttggggaataaaaatactcaacggaagtagagacaaaacttgaaaagattccctagtcaaacaaaaaggtaaagattgcaaaatgaattaaaagataaaagcagaaattagttcaaaataatagtatacctagcaagagtaagggaaaaattcttaagtgatctgatcaaacaaggtctttaagtagaagacaattttaagaaccagaatacctgagattttagattaagaaggcccatatattttcagcatagtggatgaaaaaacactttaaaaaacatttttgtgaaatttttgataaccagcaataaagagatcattctaaaagtttttagagaatgagagaaacatgatacctacagaggacgggaaaccagaatggcactgaacttctcaagtgggaatcagaaaacattggagcagtgccttccaaattctgaggcagggccaggcgctgtggctcacgcctataatcccagcactttgggaggccgaggtgggcagatcatttgaggtcaggagttcgagaccagcctggccaacaaggtgaaaccccatctctactaaaaatacaaaaatagctgggcatggtggcaggcgcctgtaatcccagctactcggcaggctgaggcaggagaatcgcttgagcccaggaggcagacgttgcagtaagccaagatcgtgccactgcactccagcctggatgacaaagtgagacttcacctcaaaaaaaaaaacaacaaaaaaccccccacaaattctgaggcagaatgattcccaaaaattacagtaaaatcattttcagacttaaaacatctctaagcatctattttccatgtaccctttctcaggaatctatggaaggaggtgctgaaaaagaaaattcctttctcaggaatctattgaaagaggtgcttaaaaagaaaagaaaaaggaagatagatggaggaagtcttggaatttaggaaagagcagatccaaaagaactgagagaggcaaagggaattcacaagatgctcgtgcagggaccccacagcacagcagttttgcagcagtcctaggtggctccaaaaagatggaaggagcggggagaagaaatcaagcatttagaggtactacttagcttctttggaatatgtgaaaattacttaatgacaggtacgtaagcaaacagagcagggaaaaagaggcagttcttaacatccatggacaattaaagattatatttactatgagaaaagaaatgtataattgtggtttactgtgtggttcactgtgattagcagttttataatcatcataacgtagacattactattgattcggttgaaaggaggagatgttaccattgtagaaggggcgtgagtcagggagaaatgtgtatgtggaggtaggcagcttgtagataaaaggtgctaaatcttctcccttagaagaaggcagaaagtaagttaatcttgaaaaatctatacttaatttatgtttttttttttaatttgaggtaaatagaagaagcagcaaaaagagttgaaaatatctgtcttggagcagacatcaggagtggggagggatggaagaggagactactatttttattattagtttaattgtactcctttactttaaagatgtcacatatattattttgataaatatgaaatttttactttaaaaacaagctacagagtttttctatttttaaaaataggtctcagttccattttttctacatttattatatgtaggatcataaacacttggctaccacaaaatagagggcaacctcttggatgatcatattttttattttaataaacataagatggccacaagtgtgctggaaccgtgaaaaatgtgaaggcatggattttgcctcttagcccaaggaacttagaacttagaggttagaaagatacatacatcaatctttttttttttttttttgagatggggtctcgctctgtcgccaggctggagtataatggcatcgtctcggctcacgacaacctccgcctcccgggttcaagcgattctccgttctcagcctcccgagtagctgggattacaggtgcctgacgctgcgcccagctaattttttgtatttttagtagagatggggtttcatcatgttggccaggctggtctcgaactcctgaccttgtgatccgcccgcctctgcgtcctgaagtgttgggatttcaggcgagagccaccgcacccagccacataaatcttattgaaacatctctgatcgtaaagttgcgttgattgaaaaccttcatggttccttagtttgatatttaagaattttctaaaatcctaaccctaaatctatcaccatgataccatttcacaccaattacgatgactgtaataaaaaaaagataatgacaagtgtcaggagggtgtggaaaaattggaatcctcatacactgctggtgggaatataaaatggttcagccattttggaagagtctggtagttagttcctcaagtgattaaatataagagtttccataggacctaacaattccactcctaggtgtaatcccaagagagatgaaaacatatgctcacacagaaacttgtgcataaatgttcatagcaacattattcataataaccaaaaagtagaagcaacccaaatatccatcagctgttgaatagataaaatgtggaatatcccttgaagggaatatgattgagccataaaaaggaatgaaatattgatacatgctgcaacatggatgaaccttgaaaacattatgctaggaaaaagaagccagtcatacatgctttatgattccatttatatgaaatgtccagaataggcaaatccagagagacagaaagtagcttagtggttgcctagggctgggaggaaggagaaatggagagtgattggtaatggttaaagagtctggggatgatgaaaatgttctaaaacttacagtggtgatggctgcacgactctgtgaatatactaaaaaccattgatttgtatacttgaaattagtgaattgtatggctagaaaggattttctaggataatttttgactctactcaataaagctatttttaaaaatcctaactgtggagaccagcctgaccaaaatggtgaaaccccatctctactaaaaaaaaatacaaaaaattagccacctataatcccagctattcgggaggctgaggcaggagaatcccttgaatccgggaggcggacgttgcagtgagcccaggttgcgccattgcattccagcctaggcaacaagagcgaaactccatctcaaaaacaaaaacaaacaaaaaaaaaaacggtgagggccgggcgcagtggctcacacctgtaatcccagcactttgggaggctgaggccggcggatcacaaggtcaggagttcgagaccagcctggccaacatggtgaaaccccatctctactaaaaatacaaaaattagcctggtgtgatggcacacacctgtaatcccagctactcaggagtctgagacagaagaatggcttgaacccgggaggtggaggttgcagtgatccgagatcactctattacactccagcctgggcaacaacagcgaaactccgtctcaaaaaaaaaaaaaaaatcctaactctgccctacttttccagccttatttctcgttcttccacgtggcctctagcaatctgacttgtgttctcttgtctgcagtgcagctcttttctccagtcctccagtttaagacctgatgctacctattctttccaatccagctgaacttcctcctgttccataaaatagaaaaagtgaattcttcccaacagaaagtaatctctgctctcaacctctaccacaccttatgtttccaggcacatcactttatgtattacagtatagaggaggtgtgtgttaagttgaagcttagtcatcattgtcagccacatgtagtcaaaaattggcctaggaaatcctttaaattgctaaaatagtacaattccctttacattgaacttggccagtttttccttccaacattggaacacatctctgttctattgaatgctagttgaaaaagctgacttatatttataggtgttacatgaaataaaaaagaataataaagccctacaaatagtacaaatttggatatatgtgattggctccagcccgttcttagccctgcttctcaatggaaacaagctaaggctcttatcttgtgtagttggggagtatgagatggaggatgatagagggattggtttgtgaactgacttgtcatcatttgggacttttaaaattcagtgtacattttgcgtgtaataattggcctgtttctagttaaataaatcatctaacaaaacaaatgttttcccccatactatctagaagaggctacttttcaataacttcaccttgcaatttaaacaattgaatatttggaccccacttagtgcattgcagtgggcttttacctgactgtaaccagactcctgttctacatgatgaagtgttcaccctatgagggccaggctgaaactaacacctactaagagaatggcagaattaagtctttccacctttacactctcagatgtgcacttagtaaataggaacggtaggcagaatcaccagatcttttgaaatactttgttcttgttctctgcctgtttcttgccaagtaaattgaattggtttatataaatgaagtgtgctgtaagaaagactagttgaggccgggtgcagtggctcatgcctataatcccaacactttgggaggccaaggtgggtggatcacaaggttaggagttcgagaccagcctggccaacacagtgaaaccccatctctactaaaagtacaaaaattagctgggcatggtggcacacacctgtaatcccagctactcaggagtctgaggcaggagaatcgcttgaacccgggaggctgaggttgcagtgagccgagatcgctccattgcactccagcctggacacagagtgagactccgtctgaaaaaaaaaaaaaaaaagaaagactggttgaataaatgatgcaccatccatacaatggaatactgttacagctgttaacaaggaaaaacaagcaaaacttggtttataacatgatgcatctgagttttgttttgaagaaatatacatatgtacatgtgtatttatgcaaatgtacatatatccttcaaaacaaaattatgtgtgtatttgtgcctgtataaaatatttctggaagaatatgtaataatttagcataatagcagttgcctgtggggaaaggaaccaggagttgatgataggggtggaagacttagctgtttctacaaatgctctttaacatggtttgactcctagtgcgtctgtatattacctttccaatggaaaacatttacatcttcttaccaattaactattaatagttcatggtaaatatgtatatgtcattttgagattttcattttaaattagcaggaaatatatgtatactgataatgtgtgctagtgcttgttggattctccagcagctcatgtatataccaccaacgatgtaccaatttgtgtttcacagagttacatccatatgggagaatagtctccagatcactacaatttctagctttgtaggagcatggcttggagcacttcctattccactggattgggaaagaccatggcaggttggtttcagttacttaaagcaacaaaataaatgtttgtacaatgatagtaaaacagatgaagcaaactagtgtgtatatgtaaattgttttgttgttcaattaagtagggataccacttctatcagtcactgtaatctgggcagcttcttaatggggactgtccagtgccacaggtgtctaggtagccctggttttatcttctagcactattttttgcacatgtgtagatgaataaacaagcttattttgtgattgtatataggcggtttgtttattgtttttaaaaaagacaggttctcactctcttgcccaggctgtcctctaatgcttgggcctaaacgatcttcctgcttcagcctcccaagtggctgggactacaggtgtgtgccaccgagcccagccagtataggaatttttaaaaactaggttaatagctgcagaaatttcctattttcaactttgatatttattgcccttgtggtcttatattcatattttctgaacttgattgatggccaaattgaatgttcctcttgaaatttttagaagcagatagcaaggtaatttttgcagcagcggcctgtgttatcaagaaagctcacaaacatcagatttttcgtcttgtatcacaataagataaagctgatatgctaggtaaagcactgtgaggtaagtgctctttttatacccattttacagatgaggaaactgacacctagagggtatgtaacattcccaaggtcactgaacttacagtgatgactgtatctttatcttaatattaatgactttgtagtatgccattatatactttataacttatttaacaaattcactattgatcatttagattattgccagtattttgtgataataaacactgctgtgataaaatctttgaatctatagcttcttgaatttttctaattaggttcacagagtaattactcccaaaaagaattatggtattaaaaaataaatgtgctttctttttccaacatgaagataatttttttctgatcacgaagataatgtatatttatttagaaaattaaagcaatattagtaattctaaggaagaaagtaaaaattactttcctccccaaccacccagaggaaacctccatttgcttttggtgataatttttgcagctgtctctctccatgcctgtaactataatattcatgttgtttttaatctgctttttcccctcagcagtatattatggagctcattctatgtcaatgaaaacttacatatatgtaatattcgattatttgtgtaaaatattgtaccagttttttattaaagaacatttaggtcatttcctattttactattattattttattatcaaatatggtcattatcatacttatacatctttgcatatttgtccaattttctctgtagggtagagtcctacctaatgaattgatgaattaaatctttgatacatacctcatttgccaaatgtgggatccagattgtgtgccttgcacataactgcctacatttagctctattctttgtgctttcagttagatgtcgtgtctccccgaaagtcaaattgttgtttcatgtttaataggtctgataggtttgcccttccctgttttaactcttcatcactatattagagaaatccttggaggtttggtgtgtgtatcgtcacagattcccatctcaagtttttggtgctagtaaaggtttcttaagttgacatcttatagaagtcatccatacttgatgtcattcaacagagtgtcagtgatttctaaattggaggacaatcaaaatcattgaaaagtatacacagaaaattgaaactgtgtagattcattgctatcaagtaatgcaattaaatctaaatagaaagtattgataaataaagtactatgggacattagctttaatgagttggtaagatataataatcattttgtatatgatgcaatacattagagtgtaaaggtttgatatattacacataatttaagtcttttctgtttacaagacagtgcagtagtagaaactgaactaagaggaatgaatatatgtgctttataaaatatgtgtttaggtttgcttagaaaatatatatcttaattatttacagttcagtcacccattttgggattgttcaggcttttagctgatgacccatttttctccctcagtgcttgttaacaataaggatgaactagatccaaattgatggtattactttttaaattaatgtaaagtttccatttgaattactgactttttaaaaagattttctaggtagctggaaattaatttaattttaaatctaatttaaatacataacaagtgttggtttccattaagagtgtttcattcagctggaatattactggccatgtaattatctttactattgggttgtttttagaatattccaagttaatgacccacgtattcactgtaaaccttttaaattatgaaatgtattgttgagggaatgatagaattgatgtataattaaaaatcttttattcatatagcactcatctgctccttgcccttttagcagttatttactaataaactaaagaaatgaggtttttttttcactttttatttccagcaaacaaggttgtttgtttttttgttattgttattttttaataattctaactccacagaacagcatctcccagagaagcaataaatcagataagggaatatggcattttctaaaagtggagatgttgttagagcaaaatttcatgagaagacaatacagtatacactttattatctaaaatagaacatgtattaagagattcttgttctgtgttccttgtagcccaataccgatttgatctgcttgtggtaaagcaagcttttctggattgtgttctggttttatttatattccagtcagagaaacaggaatatctggttaagcaattgtacctttaaaaacacacacatgcacacacacacacaaaaccccacaaaatctactacatgttttaattcagttttctttactttgaactcaaaccattgtataacattcctgaggccaagcataagattatagtgatgtggattctgtaatgagctgtttcaagcatatttttatgtttaaaataatttcttcattaaatgactggaaaggcccactgaaaatatgtgatctcaatgtaaaagttttttaacttaatataaatcttaagtgattttaaataatggcaagtgatgaaagattaggcatctttatagttggaggaagcctttcttttgtagaaggcagcaaggggatatggttaaagagaatatggtagggtagctacccattatactgttggtcatctttgttgttgttttaatactttaaagtcatcttcttgcctctaccttatttgccttaaaatctcagcaagaaaacaaatatttgaatttcccataatccagataggctttttcaacttctagagaaagcttatagttgctgacaaaataaatatttggactacagaaaacctttgtattttataatttgattctttatctgctgtaactaaatagctaatcaataagtatttgttgttattactgtatgcatagcatatgttctgtgtaagtaagtacaacagatacttaaatacacccaggactggaatttaattatttaataatttagatttgaactgtgatttagatttaatatgctgtaactatttcatagaatatgtagctatgaggtttttcatctggaaaatgtcttgtcaaaacatggctagtatttcatgttataaaaaattagtggaaggttaagaaatattgttggttattctgagcacaggaaattgaccatgaggtttttaaactcacgttttattaatgggtaggcaggtaacatgatgattaggagttctggcatcagattactgggttgaaatcctggctttgtcacttgctagtgaggatgaaataataaaatccctctaaaatacctagctcagcacctgacacatggttattacttaattaatgttacaggcatttgtgacctagaaaagacatagtttaatgactatatttttagccttcaaaaaatgcaaattccatgatttatttgagttctcatatattagagaatatgttaattgtctcagtttgttgttttattttttctgcccagcagtctttcagttggtagagtggactgttaatttatctatttctctggtatttagttatgccaatttagggtatttggatttcacataattttcaatcctgtctgacatttcagatgacagtagaaagaaaacgtagcacttatagatctctccatgtaccctgcagggggcttggtactgtgaaatgagtaacttaatcctgacaaccgtagtgcaaggtaggttttactcccattttatacactagaaagtccaagtgtgagaggggaggagtacacatcttgcttagcattactcaggtgggaagagggagacttaagattcacatgagagccccactacaccatgattcttttcattgctggaaactaaaacatagcttttctttttaaaaaatggtcatagcttaggtctctttggaatagctaaattacttattatatttcatttctttccccacattgttttcattacatgccttgaccgttgtggtggtgtctgtattttaggccgtaatttatttgtaggagaatatttaaagctaatatgcaatgattttgtccctaacaaatccacacatgcctttaaactatggacttcagtgctacaatctttaaaaatatttgaaccaaataatcaagtctcggctaggatgcttatttcttacgaaggtaaaaaggaaaattgatataaagtattttaaataactgaatttggagattttgaattttagacacctgagatcgtctttgaaacaatttaaagttgttttaaaatatttgtacttattctcaacagacaccagataaatgaggcattgttgtatttaaaaattttttgggtttttttttttcagttttaccacgttagaaatctagtatttgtgaaatatgtatattcatttcctaaagtcacagatgccacagataattctttcataagttgaaactaggaatcataggattataactacatgaattactgcaaaatgctggagggagattaaaactaagattatggatttgattgattgaagagctgcaggtttttacgttaattggtatttccattaccaaagggatgatactgtgttttagaccaaaataaaatactcatttatatgaatatggtttgtatgtttcaagcatgagaaaaatgtgttaacattgaactggcatgaaatggttttggattgaaaaggcgtgttcatcgtagggtaatcatgttgataatgctctgctaacaggactttcatgttagagagaataatgctggccaagttaactcgtttgcacgagttgtgaccagaaccttttagtgtcattttgacaagaattccagaccaggaactacacaccccttcgcaaataactcttcctaaagtagtattcttagtcacaggagagtgtatacatggatgagtgtagatttttaactagagaaatgtatcccaatgagtagattcatttgtgcatgtattcctgtatcagacaataacatttactttaggaatatctggaaaaacatactgttcaagaccaattttggaggagaatataaatgattatttataaccagtaggtcagcaggctttgaaagatgaactctctcagtcatgcaaatgcaaatttgtgataagcacaattaacaaaacaaacatattgaaaagtagctcatgagagattgagaactggattttatcttcctttttatctcgagagagacagtaatcctaatggttgtgagttgttctaaatgtctgtaggtgttctgatttgcagataggtcagtttctccatgttatctgtgacagtgtaaatctcccccaaaattataagtaatatttattatattggaacacatttttaagaatttatactaaaatgtatccaaaattaaataatttaatcttagtttacacctttaactgctgggttaaggtaggggctccacaaatagtttcgaatgaatggagtcattcatatgagcctttaaaaattaacacaaatgcctaccaatgattagtttaaaaccactatctgtacttaaaattttgtttcttcgaatttatgaaaaatgacagctagcagcagggtaaccttctgaggtaaggatacagatggttaacgtaatgccagtatgttgtacagctcctgaatttgctcttgtaacagacatttcacatgaagaacagcatgtattaaagatgattgctttatggctgggcgcggtggctcacgcctgtaatcccagcactttgggaggctgaggcagacggatcacgaggtcaggagatcgagaccatcctggctaacacattgaaaccctgtctctactaaaaatacaaaaaaattagctggacgtggtggcaggcacctgtagtcccagctactcgggaggctgaggcaggagaatagcgtgaacctgggaggcggagcttgcagtgagccgagattgtgccactgcactccagcctgggcgacagagcgagagtccgtctcaaaaaaaaaaaagatgattgctttgcaagggtaaagaatagttcctaccacttcctaccacacagtatattactcatgaactattcgttctaaactgccggttctacttattacatagtagtgtcagtgaccaaagaaatactgtttgtgtaagtttaattttttcaagttaaaacatgtaatatacagaatactggtacgtggtactttatagctttcatgacaaattttaagagattacttcagccctgcattttaagtatagtaggtacttctgtccctgttctgtaggggaaactgaggctcagatgttaaaatgagctggctaaggtcacttaacatctgatgtaccacttattttttaattagatttttcttcttcctggtaattttaataattttacccacttgagttgtaatatatttgattatacaccataggttgtttcttctatttactggctaaaaaaatgtaaatttataaaaaactctcactatcttgcccaggctggcctccagtgcttgggcccttgtcattttggtggcaaacacttgtgaatgacttcctttacatgaatgtctttgttctaagtttcctattttctttaaacaaaataattatataaagccatctcagattaccataatttggagaaatctttatagcagtgcagctgaattatgtatttaatagatatcacttttttaaaaaatcctatttgtggcatgaagaacgttgaatagaaacatgtctgtatgtgagataaggaaatagttttaaaggaaaaccttaggatctaattatgaaaatacctgattaagctaggatttacaaatgaattctgttgccatagtgtagtttaaaaatttttagaataattataagaaaatcagtaggaaacttgcttgaggaatagttcttagtgggcagcctccctccttttgctgttccctattttgataatctattttgatcttcaaaaatcatgaaaacggcccttaaagaaattctcttttaaaaaaatgacagggttacgattaagaaatgcttatttcaggaaagccaaggaggtactcttgtaagtacaaagcctgacccatcattaacagtcttcaaagccagtccacattttaatttgctgatggcatgcacttcttgatttacataacatgaataaccaagtgttccaagccgtaacccttcattagacaaaattttttaacatttcatttttggcattctgttggaggtgaggtgtggcagctgtttaaaagaatgtgcgtggtggtatgtatgtgtttgagaacaaagagccatactgaaattacaaaatgattaaaatacaatttagtaacccaaattggaatctagctgggattcatgagggattactattctccctatactttaacagtgagctttttttaacagagtatagggactcatactttgccaatgattagtagactctcagcataaatagaggaaagagtattatcctaaatgtttacatagggtaataaataaaaactactaaggtaaaaagttcagtgctttacgtagatagtaaactatgcatagtattttatttgtaaccccatgtgttaagaagggacactgttaaagtaacaatcatttaaaagtaacaaccaacaaactggtatttaatttggtattttaaatagttaaaaatcaaatggaaacagtgtctaaagtcactaagataattcataacaaaacccattaatccaagctccacttattgtaaatagaattcaccatgagctaacctaaaatgtacctgtggagataaaacaagagtgtaagttagcaaagtattaaataaaatttcagggagcccctaaatttatttttaagaactttagaactaattctctatatgcaaacactgattaactcaaatatcttgtaagttcattcatacatggccttatttgaggcagtgtatttgtattcactagcaaaattcatgtcagtaaaatatttttgaagcagtttatttcccagatatttcactagtttgaaatagtcatttcagtgattagtctgaatttctattgaagcctaagctttgaatgaagacatgcttctgaaaataaggcagtttttctctagtctgcttatcaatagaaaacaaatctttggtttttagttaaagtgacaggaaggatttttgcaaaaagaaaaactaaagaaccaaagcaattaaaaagctcttgataagcaatggggaactccaaacccatcaaggtcagtagagtacctaaggcacctcagcttcagatgtgacagtcatctttgcttagagttctgataatctatatacatgatttttaccatcttgagaatgtgaagctgaaaaggtaacatccaacaatgattactgtgaataagaaaattactgtgataaatgggagagacgttggagatctctgttctacctcccatatttataatgaggaaaccaaatcccagtcaagaaacaggtgacaccagtttgtgtagacaaattcctaatctgtttctgttagggcagggcaaattctagacttctaactttgaattagtaaaccaagtgtgaagggtttcagagatatgaattggagccccctccccccaccaaaaaaaatcctcataaatccccaaaggcaagttggaaatgtgtaatagtttactgttgtaattcgtttataccatgtgttggacaactcagctaatatgttaattgatttatacaattcctttcaattttatctaaaaataagcagaccaaaattaaataagaaagttacataagattccatttgagcatacataaggccatgatactttaatgtgaaccaccatttcttggaagaaagaagacatccaaatgtccgattcagagagaaagttcctggccagtcatccagtagactctctccactcttcaatgggaaggtgatgcttatatttttaaaaatctctacaaagctcacatacaacaagacagtacatcctagatttgtgactgatatgagcatttaaggctgtcattttcaagtataaaagtttagtgttccattacccaatctgtgcagtagacatagctataagctcaagtcatgtgaattaacagaagcccaccaaagacatttaaaaaattataatttgggcaacagcaagtttaaatgtaggaaaggctagaaaaaatgtgatgagattgtttctctaaaatgcattaggttgttcacaatgaagctttgtctaacaccattatctgatgcatccattatctgatgcatggcatatgcaataaggcagatccacagcagaccaaacaaggaagctgaattaggtaatagaactagtaattaagatggttcacctctaacacagttctgtggcctgttccccccagagaaagattagaaatggctccagtgtaccaaataagcttcacagaagaacatgaaaattttcctccaacttttttttcttttttttttcaagcagagcctttcacttagggaccaactgcttgtagatgaaataaatcaacattaattacttctagcctgatgtaatatggctggagaaaaggggtctctggaagccggtattttgtttaacttacattctaggtgtgtatataagttgtcgctctataacttctgctgtggttccaacatctatatctgaaaggtggaagcagctgctctgttacaattttcatgtaacacgcttggattctaggtctttcctctttaacacaacttaaagaaagtttcttgtggtttggtcagcatacacacttctcatttcatttgatgtacacagccaaagtgggaattaaaaaaaaaaaattaccaactagttcagagagctaaattgagtctatcattatggcaaagtctgacccaaaattttaatttgtaattttagcatgtgtctcatgcactttggggagcgtcaaactaaatctacaattgccagaagccttgttacagtttaatgcacattaactaaaatgtgtacatttttagtgttcatgataaatgcagttatgaccttattacacttttggcattctttaagaaagcacattaagctttaatatagaaatatttaggttacacttgtgctcaagtaataataaaacatttgttcttttttgatctcatacattctctcctcaggtatggcccatctcctgtacgcttggagcgacctttggctacgtggctggccttgttatttcaccactctggatatactggaatagaaagcaacttacatacaagaacaattaactggagcaaagggagatatttctttgtgcagattctgtaagggctgggcagaaatgtgtatggtcaaagccaagcagttccatttacagctctgttttttacgtagttacaacatgatgtgattgtagctttttaaactatgaaacccctgagagattgtaccttctagttgaaataaagtatttataatagattgtggcttca

SEQ ID NO: 23 - DNA, 4066 bp, Homo sapiens
cagggtaacgctgtcttgtggacccgcacttcccacccgagacctctcactgagcccgagccgcgcgcgacatgagccacgggaagggaaccgacatgctcccggagatcgccgccgccgtgggcttcctctccagcctcctgaggacccggggctgcgtgagcgagcagaggcttaaggtcttcagcggggcgctccaggaggcactcacaggtgagcgcatgccgaggggcctggcgccaccgggggtcggccccatccctgccagggccgtctttcttctactcctgcggcagggtgacccacgggagcagctttgggactcggtggccctcctccgacccccggggcggcccgcagtccccagtttcctgggtcctcctccccagccctgtgctcgggtctcggccgtggcggttctgatggggcgcgcccctctacgctctcggaggcgcagaccctggtcctggagtgccagcccgagtccccagcttatgcccctgtctcattacgggctcgtctccctcgctggaccctcgagatcttaagaccctcgatggatgttgttgcgggccgcccggtcggccgaggggtcccgatgagggaagaaggtgcagtcgagccttttcaacaatttggagtcccagtgcggttcttcctgccggtcggggtgcgctgtgcctggggtagtccactggttgctgactggcttcaagttggaatttgggccccctttgtgttatctttggttccccttagccatctgccacctattgtggtagggaggagagcctcgtagctcgtgaccctgccgtgcgggccttcaagttgggaggtgaagagataagcagcccgctcgctggctggggagagacctctctcccagctgtttctagctggttactgtcagttttgggaagcgatagccatctcggaacgcacccacacagaccctgccttctgaggaaaacagatgtttcatcaaaacaacccagttttcactcccttaggcactgctaaggaaggttctctgactcttctgaaggaagcagagggaacacagggtgggaggtccagtgacttgctgtggacccaacaatgttggcagccttcctggccctgaaacttcagctcacaggtctccagaggccctgcctggacatgccagtcccagtcacacccttcccttgctttgggggtgtgccaaaagcaatacactggccactagagagtaccctagagctctagaatcccctcccaacacgcacacacacacacacacacactctctctctcacacacacacactcagtcacacacacacacacacacacacacactctctcacatacacttgtcctggaagcaggaaagtggatctttccagcttccataaaattttctctgctaagtggaaagagggtcctagaactcagaggaatccacctcccttacttaaagggcccctttctctcctcctgtcccttgaccctccaccccgccctatggtagtatccatggcctagctgctctaaccagggcatctgcccctggtcctgtctccacagagcactacaaacaccactggtttcccgaaaagccgtccaagggctccggctaccgctgcattcgcatcaaccacaagatggaccccatcatcagcagggtggccagccagatcggactcagccagccccagctgcaccagctgctgcccagcgagctgaccctgtgggtggacccctatgaggtgtcctaccgcattggggaggacggctccatctgcgtcttgtacgaggaggccccactggccgcctcctgtgggctcctcacctgcaagaaccaagtgctgctgggccggagcagcccctccaagaactacgtgatggcagtctccagctaggcccttccgcccccgccctgggcgccgccgtgctcatgctgccgtgacaacaggccaccacatacctcaacctggggaactgtatttttaaatgaagagctatttatatatattatttttttttaagaaaggaggaaaagaaaccaaaagttttttttaagaaaaaaaatccttcaagggagctgcttggaagtggcctccccaggtgcctttggagagaactgttgcgtgcttgagtctgtgagccagtgtctgcctataggagggggagctgttagggggtagacctagccaaggagaagtgggagacgtttggctagcaccccaggaagatgtgagagggagcaagcaaggttagcaactgtgaacagagaggtcgggatttgccctgggggaggaagagaggccaagttcagagctctctgtctcccccagccagacacctgcatccctggctcctctattactcaggggcattcatgcctggacttaaacaatactatgttatcttttcttttatttttctaatgaggtcctgggcagagagtgaaaaggcctctcctgattcctactgtcctaagctgcttttcttgaaatcatgacttgtttctaattctaccctcaggggcctgtagatgttgctttccagccaggaatctaaagctttgggttttctgaggggggggaggagggaactggaggttattggggttaggatggaagggaactctgcacaaaacctttgctttgctagtgctgctttgtgtgtatgtgtggcaaataatttgggggtgatttgcaatgaaattttgggacccaaagagtatccactggggatgttttttggccaaaactcttccttttggaaccacatgaaagtcttgatgctgctgccatgatccctttgagaggtggctcaaaagctacagggaactccaggtcctttattactgccttcttttcaaaagcacaactctcctctaaccctcccctcccccttcccttctggtcgggtcatagagctaccgtattttctaggacaagagttctcagtcactgtgcaatatgccccctgggtcccaggagggtctggaggaaaactggctatcagaacctcctgatgccctggtgggcttagggaaccatctctcctgctctccttgggatgatggctggctagtcagccttgcatgtattccttggctgaatgggagagtgccccatgttctgcaagactacttggtattcttgtagggccgacactaaataaaagccaaaccttgggcactgttttttctccctggtgctcagagcacctgtgggaaaggttgctgtctgtctcagtacaatccaaatttgtcgtagacttgtgcaatatatactgttgtgggttggagaaaagtggaaagctacactgggaagaaactcccttccttcaatttctcagtgacattgatgaggggtcctcaaaagacctcgagtttcccaaaccgaatcaccttaagaaggacagggctagggcatttggccaggatggccaccctcctgctgttgccccttagtgaggaatcttcaccccacttcctctacccccaggttctcctccccacagccagtcccctttcctggatttctaaactgctcaattttgactcaaaggtgctatttaccaaacactctccctacccattcctgccagctctgcctccttttcaactctccacattttgtattgccttcccagacctgcttccagtctttattgctttaaagttcactttgggcccacagacccaagagctaattttctggtttgtgggttgaaacaaagctgtgaatcactgcaggctgtgttcttgcatcttgtctgcaaacaggtccctgcctttttagaagcagcctcatggtctcatgcttaatcttgtctctcttctcttctttatgatgttcactttaaaaacaacaaaacccctgagctggactgttgagcaggcctgtctctcctattaagtaaaaataaatagtagtagtatgtttgtaagctattctgacagaaaagacaaaggttactaattgtatgatagtgtttttatatggaagaatgtacagcttatggacaaatgtacacctttttgttactttaataaaaatgtagtaggataa

SEQ ID NO: 24 - DNA, 54644 bp, Homo sapiens
gcagtggcgacgccgagccggcgccctcagtctcctcctccaccgcctcccggttccgcagtcacttcctgcagctgtttccctgtgggtcgggttggactgacttttgacagtcagccttcggctgcggagggggctcggcggcggccggcggagaaagttgctccgagaagaggctgggtcgagctgggccgagccgggcgcgcagggcgggcgtcgcgggcgtcccgggcggacgcggcgcggagactgccggcgcgtcccgggggttccggtaagtgcgggcgattgggagccgcggagctttcaggacgagcccctggagcgccggggactagcggttcctttccgatgctctttccatctgccctccacgtgacagggcttgcgctgcttctatttatcagtttgcttgtttcaggcatttcacgtggaccaggtggatcatctgtgcgtgcagctgccttggccctctcagttgcccccgccccgtgggagtcgggggattccatccttcgtgatggcatccataccgggttgaggtgcgtgtgtgggttcgtgtgtatgcatgcacatcttaggaatgtaaggtggatgtgggcgacgctgaactgtctgtagctttgattcaaatctgtaaacagttctctaggattaggaaccgtcacagcggagactgaaaaacattcgccaattcaccaaggcctcttccccagttttctgcgttcttttgagccttctttataggatacaccttgcctcaagtgattattattattattttttttaacttttctccctctcattccttcttgctgcgttctgatgacctctgagtaatgctcgctgcctttccctcatttccagaattcccaattacagacttacctagtttgctgaggtgctcctaacctgttcctttattctattctctttcctctgtagatttctccaaatgagacaagagattgtctttaacacagtatgtgaagagtaggccccagtccaatcattaaaactaagtatgctatgacaattaattttctttaaacagggtaccttgtgaagctttgattttctttaatgtcgtcttagctcctttccaaaccaggacattaaccagcataaatccttcatttatgccatcgcaagcatcaaagtgactggtttttaagatttgaagaatatttatgccagtcttcaaattagtcccttttaaaccaatgcaacagttgaacagatctgagttgcatgttttgggtctctgtattccatcattcatgcattcactgaagacttggttttattcattttaagatttatattttatactaatttttgtttgcaaatgtactaatatttgatgcaattgtcatacatagatttttttgaggagtcgacattgtgttgattgttaaatataacaagaaataaatttgggatatcaagctactctttaaaaattgtaaagatcaaatgtgataatgggtaaatctgtgtttggcaagaattttttctttaaatcaggtaactgtcacctctggtaggaggccttttgtgcctctgttctttgagaaggatctttattttgagggaaacctgtagataacactgggggagacacatgctagaatttcctcaagtgaaagtgagctttcataaaacaagtccagacatgcctaggcaattggtagcatttgattttctgtttatattgctgatttcctttatccagaggttttgacacccccccccaccttttcactaatgaactagcagaatgtttgtggcaatttgacatcagtagcttttcaacattatgaattattattattaggtagttaaactttttaaaagctgttctttgtctacttagttccgttttctaaaatgaccatatctgtctttgctttctggactatctttgcttgattcaattaagagaaataataccattacagagaacctgactttttaaatgttaaaactctatattgcttttcttttatgttcccagagatatgggcagtacacttctgcttaaaaattaaataatattatcatttttctaaattttgtgattaatgagaagtattgttaaattctatgactaatacttatgcactttgtccttaactacattattttcccatcacgctgatttcctttgttgcctccccaccccaaatttcgtctgaaagttgttacttgattttcaggtgctgtgtagttatcaaatatggtaaaatagactttaacttttcaaaatttacttgattcattttagtaattctattattgccataatgtacacatttccattgcagatggaaaatttcagcagcttaaaatagccatattctattgaccaagagaagaggttttaataatactgtattgagagagtggagggaattgtggattttgaaataaggattctaatttgggttaattagaatcttgggaactcaaagggtgtactgtggttcattttgagacactcagggttagacggcgccatctgggggggaggcaggagacattatggataaagattgaagagggagaggaacattttgggtcttttctgagggaattataatagagactatcagttatttgttaagaaggaggagggaaatagcctcaagattgaggaactggaattatactgtggcttatggtggtgtgatccattactccattggacatttccttgataccttattttgtgtaggtaatttacctagagaaggaggaaaaatttgggttttacaggggctgatgaatataatctaaggctgtatgaggcagggctgtaaactcaagagctcacagagaacaggcaagtaacaagtacaggcagcagctgagtggggactgaggtgtcccagagaaggcaggcctcgctagagggcacagtgcctctgagcactaactagctaattgcgtcccatataggaatgtgggccaagtgatgccagatcatcctttttcaagagaagccatgaatctcttgatttttaaatgctaacaactaattcgacttaaaaaaatgaaaacaaaactgtatattccaaacagcacatctgtggctgtatgtggcccacaggctgtttgccacctctgctatacatttgctcaactacttaaatattgctagttgatcagaaggaacatattttatttatttctgtcatactttaggctactcctagagttccctgaaattttagctagttctataagtgctttaagaattctgcaagatgatattcttttatacactctttttgatattggttggttggaagatatgtttgctaagatttttagctggtggtcttttttttttttgagtcacagtcttgctctgtcacccaggctggagtgcaatggcacgatctcggctcacgaccacctctgcctccccggttcaagcgattctcctgcctcagcctcctgagtagctgggattacaggcactcgccaccacacctggctaatttttgtatttttagtagagacggggtttcaccatgttgtcttgaacaggctggtctcgaactcctgacctcaggtgatctgcccaccttggcctcccaaaatgctgggattacaggcgtgagccaccacacctggacagctcgtggtgtttttgtctgtgcatgattatcattaagagtgtttaagtgtaagtgtgcctgagggaaggggtctggactaggtgacatttgatgtccatttcagccatgtgacttttagatttagccgtggatgcaatgctgttaatgttcacgggccaaagggatagcagttggaactgtgccaagcaaaataaagccaaatctataaagccattctcagtggaagagcaccgtgttaacatgaattaacaggcaggggaagtctgctaaatgaggccaaaggaaagaagtcccaaagatgggtttggagaagtagaagaaagggtcagattatgttgtcatttacatgttatcttgctgaagtctgattttcaagtgagtttttttttctgtttttttgctgttgattcagatttgaagaccttgcttctcatcacccactggattatgccccaggcttccctacccaatgatcctcttgcaacacgccgtgcttcctccacctaagcagccctcaccctcgcctcctatgtcagtggccaccaggtctacaggaaccttgcagcttccaccacagaagccttttgggcaggaggcttccttgcctcttgcaggggaagaagagttatcgaagggaggggagcaagactgtgccctggaggagctatgtaagcccctgtactgcaaactctgcaatgtcaccttgaactctgcacagcaagcccaggctcattatcaggtaaagggagaaaagaaaaccaggcattgagtagggtgaacatttcagggctctggctatttagcagttgtctctccagatatgactgtgcctggaataccaagatggcttagagaacaactaactatgaatttgtttgattaaaagccttatgtttttactttaaaaataagtatcactttttgtagactggatctcaacctgttacactaagctgtgtggcatgcgatagcttaccagtctttgtaggcaaatgtaaatgatctatgctggcatctgaacctgtagtcttaagaagaacaagtatttaaaccactatttaccagcctgggtgacagagcgagactttgtctcagacaaacaaaaaaacccatgatgtaccgaactcaattcagtgtaaaattgtttagaagctaatataatttgcatcatttcgaggtgacctctgtgcatgactcttatgctttccatttttgacttctaactcttatatatcctatcactggtaaggaaaacacaggtatctttttgtggtgagaataaaatgacattgcaatattgagccctatccttcattcataataaacatactctgatttattttagcccattagcgtaaactaatactggtttttaagatttaaagctttcacctccatgttgaatagctagtggaaaggaccattttaaagggtaatattacctaagaacaaatggaaaattaaactttggttagcaagagacggtacaatatttctttttattctagacatttgtctgtataaagttaaataatttccttttttggagaaaagagacctgggagataatcaaggacaaaacccagtgaatgatgtcttcccgggtcatcactgatttgattatttattatctgcttgaaaatctctagtaataagagagtatggtagaagactgttacacaggtgtttcttctgttgtgcactataactttctccactttgtttactgtgggtgttaagtcttttctgttttgttttgatcccaaagactgattattgtgttgctttttgattgtatgtcggaagtattttgatggtcaattgttttctctggtatttaggggaagacataatatgttgcctcctttaagttcccattatgtggttttgttttgccctcaggtgcagagagttgagttaattatatctcgcagctcttgacatgtgtcatcattggttcctaaaggcctcttctggttttatttttacgttttccccctttccccagtacgtactctcatcaccttgctgtccagtacagttgtttgatacagggtcttcctttgcctgtctttaccattcaagcagagtctgttagcatgattaatctcaactccaagactgtattagctttcttcatttattcctacggaatgttcagttttatagcctaagactcactttgaaaaaagaagccagggttctaaaggtttaattattagccatataaagcccctaacaaatcattaacttgggggcaaacccacttgtatgctatacacatatataattatctttatttatttatttttttttgagacagagtctcgctctgttgcccaggctggagtgcagtggcgcgatcttggctcactgcagcccctgtctccggggttcaagcgattctcatgcctcaccctctcgagtagctgggattacaggcacacaccagcacacccagctaatttttgtatttttggtagagatggaggtttgccatgttggctagattcagcctcccaaagcgctgggattacaggcgtgagtgacctaccgcacccagcctataattcccttttaaggaagagttgtttacttttatgagggaaaactctcgggcagtgtgtaattttaacatgtccatggattatacatataccttatttctttttttctcctaataaaactttttgacttcatggactttgaaaggtgctactgatgatacatagagaagattcagtttgatgcaaggtctttggattataaggctaaaactagataagcagaatcaacatttgtttttttcttttattttacatttttgcgtatgttctaaactatgtagttgacaagattagtaattatacttaatttcagtttcctcagtgatacagtgaataaataaattagaaaatataagaaaagggaaatacaatttaggtaaatttctcaaaaatcagaatttttaagtggaaaggttgaaggagaacaggatgtaatgggacaatttaagcagctaaaaaccagggtaaagatgggaaagaaaagaggcaagcaagtaatcagaaagtaggagcttacagaaaatgaaaagtttgggtataataaagtatattgctaagacttcagaagcaaagattcgaatgagactgatgttattggtaactcttaaagagagaaggttttaacagacaactaaggcaaagcagttcatgtgtaaaaatacagagcaattatgttagggtaacatagaagaaaggtaatcttagaagtgaaatctggatttcaataagatagaaatggtcaagatgagagtggatagtgcaaagtgtagatcagaataataaacagagtgtgaacataactctagaagtgggtgagctaccaaagaaggaaagcgtagaaatgttagccaaaaagatgcatcagagggtgtacatgaataagcagtaataaaagaaagattactgaagacaaggctaagaccaggccaggtgtggtgcctcacacctgtaattctagcactttgggaggctgaggcgggaagatagtttgcgttcaggagttcaagaccagcatggacagcataacaagaccctgtctctacaaaaatacaaggaaattagctgggcatagtggcagacacttgtagtcccagctactcgtgaggctgagacaggaggctcacttgagcctgggagattgaggcagcagtgagctataatcatgccactgcactccagcaaacaaagacaacaacaaaaaacacacaaaaaagagaaggataagaccaatgagtaaggcttaccaagcacaggaataagtagaatgccaatgattgtagactaataaagtggtttaggattaaatgagatgatggatgtaaaattttatttcaagactaaaaacttactaatttttaatacagagcattaccaagctgtaccttcattatttcagttatgtgtgagataaaatgggtcacgggtagcctgtttatgagctagaaacacatttgtgtgaagtgataaatcactgtgattacattactcaaaactttttagtcagttgatgccattgttgaaatcgtggagtttcaaattgcctcgggtattgtaaacaatggtggttacactagagccggactgtatcatgtgccagtaatccaggacacgcagtggaaactgcccaataaatacttccctttaagctcactagcattttttcctgacatcccagtgttcccaagctggggctaccttagcagtgacccatgtgtatctgtagtcatcacagatttagttttattccaaggacttttaaaaactggtcagttggcttcaaaacatcattagctattgttttatttttaatgaagccatcaaatattatattcttaaaattagggctttggatataacttaatttaaaatccaatctttggaggagaaacatattttcattttattaaagtctatctgcaggcttcaggttacttagggcaaggctggcatggggtaacataccactgtttcatcagcataaatgcccagaggaagaattgctttagcagggaaggttattaacagaaataaagaaaagcaaaaagcacggatgaattttgctaaggcatccacagtttaaagtcaccagtttatttgctaatttgcatgtatatatttaaaaagatctacttactcaaagtacatttataaaatttgtcataaacatggctttctatttgtaatagttagtggccagatagcaacctaccatgaattagattgattagagaaagagaacacaggtgaaagaatagttttagaattaggatgctgagtgtagtggtcttaattcataattcataatgaagagaatgctattagatttttcccaaaatttaaagcactgattttggcacttacattttaatattgatcacccaggtttggatcactgaattaaatctcagctaattttcatgtattcaaaattctcctatctgatttttttccaaatggacttgcagtggactgagaatggccaaaacacacttcagatttggttttaatgcatgtgctttacacgtggcatatatgctttggaatctaacaactttgggctaggatcttggctcagttactttaggcaagacactgaatctctctttattcaatatctgtaaagtaggggtcattgtacttcctctgcaggattgtgagacttgcatatgttatcttaataaatgctggttgattgaaataggttgctattgtttagaagtgtttgggtctcaaatgagcagaatgagatggcacacagctgtcttactgttgttactaccttgatagtaacttgctgtaggaccttgtgtaaataagcaaaactttgttttccttgattgttctcccgagatagtcttttagatccagataccaggttaccttaaaagattctcatgaagaataattcaaccaacaaatgaggcaaaataaaatgattttcaaatgtaaatatgctttcaaccatactactcgtctgtcagcttagtccatttacccaataatcaatccttgttggttttcttgttctgctctctgaaatcgccagctctgtaggcttttctagctcttgctttgatcactttagaggacagaagctctctgtgatcctgccagttttttgcctcctcctctagtctacccctacctcatttcttcttatttcgaaatgatagataccctttcttttgtccaagtttgattcctcatcctgttttctggatttcatcaccttttcacctcaatcaaaaactatgcccaagtcttttctatataaataaaaatagcagcagcaaccttctgtttacttttaatcccttctattagcaacctttctcctctcctctcctgtccttagcattctgcaggtagaattgttctcttcaggtctttatttcccattcattcctcagcccactgtactctgatttccattcctataggccgctgaaatggtcctttccattgtcaccatgatcttacaggccaaatctaactccttctcacttgacccctttgtagcattagccaatggtaacaactttctcctaaaaaaatttaaaaatatttttatttaaaataatgcctgaggaaccaaaggatttataatgaaaagtagtaatcacctgttctccacccattccctaccttttttttcctctccattctcttctcctttctgactcccaacttgagctggctatagttttactttgacactgtcaagattgatcacatttttatccattctgtcatcaaattaagttttccatgctctatttgcaggttgatgccaattgttgaaaattaacattgagtttttgcattattgtgaatagggaattttgcactattatgagtggggaaatattgttcactgcagagctgtttccttccctgtatttccagtgtcatgatcccatgctactcacaagagatgttcaaataggtaaccctttcctgaatgccaccagttgctcaaaattgtgtctattttagtttgcttcatatgtggattataactttgaaataactttttgtttttccttgagtttctggtacttaaaaaaaaaactagagagaagaatcttaagcctttcaaaaaaggtattagcatctcaatctttctttatattgcttacaacccatttcatttatcttcatgaaacccactgttttctgattctgattttgactagttgttctaatttggattagttgttccatatttgaatcactacttcattgtgtaggttttgtatttcccggagattttagttgcttttcttctcccctctttttcttgcattatatttttcatattatcgttctcccctccatccctaaatctcaaccccactatttattgtatggaattttccttttatcctagatccctctatctccttgctccattttcagctggagtctgttgggtttgctgcacagctttgtcagctttggacttaccactctttaggtgggatcactattttctaaatatatgttttcttttttaaatcttgttttgttggagtatattgtcacattaaggaagaaagaatgaatataaatgtacaacactttttttttttcttgaaataaaatgggggagtaatgggaaataatttttttgagcccttgcgtttctaaaaaatgtttgcattgtgccttcatgtttgacagttcagttccaggttgaaaattatttttctttggaatgttaacagctgccctctattttctgtttttatctaatgttgctgaagagaaatcttctgattcttattctttttttggtgacctgttttaattttgtgtctttcttttttttcccctggaagcttttaggctctcccttttatccttgtagtctgagatctgacaatgatggttgtgtctagttttccccaggatactttttcatttgtcctggtcagcactagtagatcctttcagtttgtgtacttctgtttctcttgctctggagaatttaaaaaatatatatatttttgagacagagtctcactctgtcacccaggttagagggcagtggtgtagtctcaactcactgcaacttctgcctcctgtgtttaagcgattctcctgtctcagccacctgagtagctgggattacaggtgcctgccaccacgcccagctaatttttttgtatttttagtagaggcagggtttcaccacgttgcccaggctggtgtcgaactcctgacctcagatggtccacctgccttggtctcccaaaaaaaaaaaatattctttcttagtcactattctccagatttttttgtctttccttctaggaatcctgttagctattgtcatggttctgcttgattgattcttttttatttttctagctttattgaagtataattgatggatagatactttatattgtttgtctctgctatcttttatcattctttttttgttttaatttgagacatgttcttgacttctaatctcatattgaattttttttttgcagttgcaagatttaatagagtgaaatagagtgaaaacaagagctcccatacaaagggaggggacccaaagagggtagctgttgctggctcgaatgcctgggtttatatcccgatcattgtccctcccactgtgctctcaggcaatagatgattggctatttcttcacctcctgttttgcctaattagcattttagtgagctctcttactggtcgggtgtgagctaagttgcaagccctgtgtttaaaggtggacacggtcaccttcccagctaggcttagggattcttagtcgacctaggaaatccagctagtcctgtctctcagtcccccctctcaacaggaaaactcaagtgctgttggggaggttggccgacaaccactctaactacttcctgctgaatcagggcatagtaggggttgtgcagttgagatttcctctggaggggtgtcttcgatgtcattaacatcggagaatgggctagcaggctggtccaggggtccatggtagattttagtcatggactgcatctggggctccatttgaagaacgatttgtagttttacagccttgattctggaagagacaaacttaacaaggaggttaaagatacagggattgaaatgtatggcctgcagtgcaggggtttatttctttggcacacttcacaggccctgactatctgcttgatagttttgaaaaggcctggtccagtaaataatgctttggccatctgatgggtgctgtcaatgcctaagtgaaaggtttggtgaagcgttttaagtaatttccattggttagctgcaggcaaaagtatttttccttcttcggtggctagccatcctgaggggaggaaatgatgtccctgtgaggttccccattctatttcttcttctgagtactggggcttggtttcctggaggggattaccccatactaggggtccttctataagcatttctaatggagggtcctgcattgaagctcttttggcttcaatatccacttggcatttcccttctatttccctttcctttcctttctgacgaccccagcagtgtaagactgccatctctttaggtttctgtacagccaataacaatctcctaatggcttcctgatgtttgataggtgttcccttggaagttaggaattccctttctctgcatattgctacataggcatggaggactaggtaggtatacttaagagtctgtatatatatttaccctttttccttctcctaattctagtgcccaagtgagggctattagttctgccagctgagcactagttcctggagtgagggaattactttcaagtattccattatcactgaccactgcataccctactcttcgaagtcctttttcttttttcttttttttttttttttttgagacggagtctcgctctgtcgcccaggctggagtgcagtggcgggatctcggctcactgcaagctccgcctcccgggttcatgccattctcctgcctcagcctcccaagtagctgggactacaggcgcccgccactacccccggctaattttttgtatttttagtagagacggggtttcaccgttttagctaggatggtctcgatctcctgacctcgtgatccgcccgcctcggcctcccaaagtgctgggattacaggcgtgagccaccgcgcccgtcccgaagtcctttttctacaaaggaacttccatcagtatacaagttgatgttgggatcagtcaagggaacctctaaaaggtcccctcgagtggcataggtttgagcaattacttgttgacagttatgttctatcttttcttcattgtctggaagaaatgtggctgggttgagttgcacaagtgcacagtcgcagcactggcccttcaagtaatagagcctgatatttaagtaaacggttgtctgacagcaagtcttctttagcagtgagtatgccgttcacgtcatgtccacacagtaagatctcttccctgtgttattttaactgcttcagatactaagactgctactgccaccactacctgtaaacaatgaggctaaccctttaccactacatcaatttccttactcaggtataccacgggttgcaagctcatccctcggacctgtgtaaggactcctagagctattcctgttttttctgtgacatataaagaaaaatcttgtcctgttggcaagcttaacactgggacttgggttagggccttcgttaggtcctagaaagctacttccgcttcaggtgtccatcttactaaatgggtattggctttctgagtttccttaattagtgtatagaatgttctgggtatttcaccgtacctgggaatccatattcggcagaaacccgttaaggaaccctattagttgctttagggttttgggatgaggataagccagtataggctggatacgttcctcactgagggccctggtgcctttggataattttagccgtaagtatttaacctgctgtgagcagagctgagcctttggtttggaaaccttgtagccacaggtagtgaggaaatttaagagtgcttgggtggcttgatggcacaaggtttctgaatgggcagctaaaagtaaatcatccacgtaccgaaggacaggagtgtccaggtattatgagaattggctcaagtcttgggctaatgcctggccagatagatgggggctatccctcaacccttagggtaaaacagtccaggtgagttgagacactgggttccaaggatcttcaaaagcaaacaagaattgacagtcaggatgtacagggatgcaaaaaaggcatccttaaggtccaggactgtaaaccactctgcttcctctggtatttgggaaagcagagtataagggttaggtacagctgggtatagagggacagcagcctcattgataatcctgagatcttgcactaacttccactgtctgttgggtttctgtactcctaaaattggagtattgcaggggctattgcatggttttactaggccttgggcttttaggtccttaacaatcttttggagtccttgttgggcctcgggtctaagggggtactgcttttggtagggaaaggacgcggaatcctttagtttaacttgaactggacaggcattctttgctcatccatattgtccttttgttgcccagacttcaggattaattccttcctcaagctggggacaacaaatgggtgttccttctcctatgttcaggtgtataatggcccctgcttttgctagaatgtctctccctaacaaaggagtggggctttcaggcataattagaaaagcatgtgaaaagagtaaagttccccatcacaacttagtggctgggagaagtatctagtgactggctgtcctaggaccccttggatagtgacagatctggaggacagttgtctgggacaggagagtaagactgagaaggctgcgccagtgtccaggagacagttaacctcctggctctcaatggtcaagcatacccggggctctgtgagggtgatggcatgggctggcgctcgccccgggcaccctcagtcctgctgctggatcatctggttaatggcttctgactcagagtatcttcatcccctggggcagtgggccttccagtgattcccttgacgtaaggggcatggacaagggggcggcttatttctacttggataatcttttttaaagtgtccttgtagaccgcactggaagccagccctattaggcatttgatttgcccagcttttcccttttgcagagcctccaaagtctgcttgcctgagggccatgactaaagtagtggacccccccttttttttttatcccgtttgtcccgtttcgcctgctcctcctgatctctattataaaaaactgaggatgccaagttaaatagggtttctaagttctgctccgggcctaaggcagacttttgaagttttttctaatgtctgcagctgactgagtgataaacttatcctttaagattagttggccttcaatagagtcaggtgacagggaggtatgcttcctcaatgcctcccttagtctgtccagaaaagcagtaggattttcttcctttccctgtgttatagtggacatcattgagtaattcataggcttcttcctagttttcctcagtccttctagcacgcaagttagcaaatgtttgtggcaccaatctccatgttctgattctgtgtcccaatgagggtctacactgggaactgcctgctggcctgtgggagttgttctttcctctgttgtcatcctattgttgacctgactgagataccaaagatcgccaaactctcgggctgcagttacagcggcacttctctcatttggggttagtgtctgatttagtagtaacattatatctctccatgtcagatcaaaggattgtcctaacccttgtaaaacatcaatatagccgtcagggttatctgagaatttacctaggtctattttaatttgctttaagtctgagagagaaaaaggtacaggcactctggctgggccgaattctcctcctctcactgcttggagggggcataatcggggaatattggcactctttggttcattgtttacccctttgtctatctccttttggaccgtttgggttaaaggggggtccttattagttgaggaaggagtcggggaggggacgctggggtagggaggtggactctgagggcttcctgtagggcataaaccacactttttacataattgtgagttgtctcttaatgaaaagaaagtttgcacatatggcacttcactccatttgccctcctttctacagaagaggtctagctgtaagatgatgttataatttatacttccctcaggaagccaggtttctctcccttgaagaggatattgtggccaggcggtactgcagaagaatataaatcgtttctttcttagcgtctgagtgtcacattggtcccaattctccagaatacatcttaggggcgtttttgccttggggggaatgtttcccatcgctttggaggtccctttgtggttgccaaaatgttactggggggtccttgctcccagagctcccaagatggcggcgggccacttccaagatggtggcaagcctcgtgttctctgacctggggttcttggcctcacggattccaaggaatggaatcttgggccatgtggtgagtattatagctctattagaagccgtgggtcatggaagagaaccatggaacccagtgactagtgttcagctcaattaggatgaacccgggcacttagccgtgtgggaacaatggcaagcctttagcccaattgggagcagcaatgggcgcctcgctggatcaggagcacagtggacaccctgctggatccggaggcatggaagtcgccggcgggtctgcgatggcggcaagcagcagtgttggatggtgagcgaaagctctgctccagccttagcaaacacggaccagaagaatgcagttgcaagatttaatagagtgaaatagagtgagaacagagctcccatacaaagggaggggacccaaagagggtagcctcatattgaattttttaatttttaaattttaatgttacatttcaaacattaacattttacataattacagtacaattgtcaaaatcaggaaattaacacagatttaaataaataagacttccagattttttattctcaattcatagcatctgttttataggatattaagaacctgaaatcgcggactttgaggtcagactagtatttgatgttgtggtcttactactcgctagatgtatgatatcgaaaacatttcctaacccttctctgcctcatgaagaaggagatgatgatgaggaggatgatactaataatatctgcatgttagtatgtgtggggcatttagaatagttcctggtacctgagatagtccttgacagtgttgagtggtcccaaggtgcagtggaaccagattgtcccagctctgcattggacaattgtggcattggccgagttttatttttattttatcaacattttagtttgaattattttagacttacaaaacagttccaaaagtagtacaaataattcctgtatgcaccttattcagactccccaaacattaacattttacataactacagtatagttgtcaaaatcaggaatttaacacagattcaaatgatattgtttaatctatatactgtttacatttcattaattgtgtactaatggcctttccctggttctagttatttaatccaggatgaaattttgcaggtagttttcatgtctcctttaatttggataggtccttggtttttctttgctttttatcatcttgccatttttgaagggttgttttgtagaatgtcccaaatttgggcttgtttgatgtttgattaaattcaggttatgtgttttttagcaagaataccacagaaatgatactgtgttcttcctagtgtgtcatgtcaagaaggatgtgatgtgaatgtcttgtattactggtgctgttaactctgatcacttgtttaagctactgcctgccatggttctcctttgcaaagttactctttttctttttgtgttcaacaaatgttatatggggaggtgctttaagactgcgaatattttatttctcatcatagttttggtcagtgatgattcttgtctgcaataattattactgtggcatttgccaaatggtgatttttctgttttaatcatttcttctaagcttgttacttggaattttactttaagaaagagctttcccatttttgcatttatttattcagttatttatattactggggatttatggattctaattttatagatattctatatctatatctatagatataaattatctctatatagaatatagatattttgtagatatattttatatctatagaattttatatctagatatattttatatctatagatattctatatctatacctatattctaattttatttattttgatttattttattttatttttttgagacagagtcttgctctgtcaccgaggctggaatgcagtggcacaatctccgctcactgcaacctccgcctcctgggctcaagcgattctcctgccttagcctcctgagtagctgggattacagatgcccgccactgtgcctggctaatttttgtatttttagtagagacggggtttcaccatgttggccaggctgatcttgaactcctgacctcatgtgatccgcctgcctctgcctttcaaagtgctgggatgacaggtgtgagccaccgcgcctggcctaagttgctgcaaatgccattatttcgttcctttttatggctgagtagtattccatagtatatattaatatgtgccacattttctttatccacacgttgattgatgggcatattttttcagttgcaaattgtgctggtataaatgtgtgcacaagtatctttttcgtgtaatgacttcttttcctgtgggtagataccctggagagggattgctggatcaaatggtagatctacttttagttctttaaggaaggaatctccacactgttttccatggtggttgtactattttacattcctaacaatagtgtaaaagtgttcccttttgaccacatccatgccaacatctattattttttgagtttttgattatggccattcttgcaggagtaaggtggtatcatgttgtagtttcgatttacatttctctgataattagtgatgttgagcatttttttcatatgtttattgcccatttgtatatcttcttttgagaattgtctattcatggccttaggccactttttgatggtattgtttgttttttgttgctgatttgtttgaattccttgtagactggatattagttctttgttggatgtgtagattgcaaaaattttctcctactctatgggttgtctgtttactctgctgattatttcttttgctgtgcagaagctttttagtttaattaaatctcatctatttatctttatcttgttgaagtctttgcttaagtcaatgtctagaagagtttttccaatgttctagaatttttatggtttcaggttttagatttaagtctttgatccatctctagttgatttttgtataaggtgagagatgaggatccagtttcgttattctacgtgcgacttgccaattatctcagcaccatttgttcaatagagtgtcctttccccactttatgtttttgtttgttttgttgaagatcagttgaccgtaagtatttggctttatttctgggttctctattctgttttattggtctaaatgcctgtttttataccagtaccatgctgttttggtgactgtagccgtatgctatagtttgaagtcaggtaatgtaagacctctagatttgttctttttgcttagtcttgctttggctatgcaggctcttttttggttccatataaatttttttctagttctgtgaagaatgatgatggtattttgatgagaattgcattgaatttgatgatggtattttgatgggaattgcattgaatttgtggattgctttttgcagtgtggtcattttcacaacactgattctacccatcatgagcatggtttgtgtttccatttgtttgtgtcatctgttatttctttcagcagtgttttgtacttttctttgtagaggtctttcagctctttggttaagtatattcctatgtattttattttattttttttgtaggtattgtaaaaggggctgagttcttgatttgattctctgcttggtagctgttggtgtatagtggtgtatagcagagctactgatttgtatatattaattttgtatcctaaaactttgctgaattcatttaccagtaccagaagctttttggataagtctttagggttttctagatacacaatcattttcattagcaaacagtgacagtttgacttcctctttattgatttggatgccctttatttctttctcttgtctgattgctctggctaggacttccagtactagggtgaatagaagtggtgaaagtgggcatccttgtcttgctccagttctcagggggaatgctttcaacttttccgcattcagtataatgttggctgtgggtttgtcatagatggcttttattaccttaaggtgtgtttcttctatgctgattttgctgagggttttaaccataaagggatgctagattttgtcaaatgctttttctgtgtctattgaggtgatcatatgatttttgtttttaattcttttatgtagtgtatcacatttattgacttgaggatgttaaaccatccctagatgtaaaaccatccctaaatccctggtgtgaaacccacttgatcatggtggattatctttttgatatgctgttggatttgcttagctagtattttgttgaggatttttgcatctgtgttcatcagggatattggtctgtagttttcttttatttggaatatcctttcctggttttggtgttagggtgatatggacttcatagaatgatttcgggaggattccctatttctttgtcttttggagtagtgtcagtaggattggtaccagttcttctttgaatgtctgatagaattcagctgtgcatctttctggtcttggacttttttttttgttggtaactttttaattaccattgcaatcttgctgcttgttattggtctgttcagtttctatgtattcttggtttaatctaggagggttgtatatttctacccatctcctttaggttttctagtttatgcacataaaggtgttcataatagccttgaatgattttttgtatttctgtggtatttgttgtaatatctcccatttcatttctaattgagcttatttggattttctctcttattttcttggctaacctcaataattgtttattagttttatttatcttgtcaaaaaaccaaccttttgtttcacttaatcttttgtattttttttgtttcaatttcatttagttctgttctgatcttgactatttcttttcttctgctgggtttgggtttggattgttttgtttctccagttctgtgaggtgtgaccttacattgtctatttgtgttcttttaggcttggcttttttttttttttttttttttttttgagacggagtcttgctctgtcacccagactagagtgcagtggcgcgatcttgtcttactgccagctctgcctcccaggttcatgccattctcctgcctcagcctcccgagtagctgagactacaggcgcccaccaccacgcccagctaattttttgtatttttagtagagacgtggtttcaccatgttagccaggatggtcttgatctcttgacctcgtgatccgcctgccttggcctcccaaagtgctgggattacaggcatgagcaaccatgcccagcccctttcaaactttttgatgtaggcagttaatgctattagcactgcctttgctgtatcacagaggttttcataggttgtatcactattatcgttcagttcaaataattttttaatttccatcttgattttattgttgacccaacaatcattcaggagcaggttatttaatttccatgtattcgcatggttttgagggtttcttttggagttgatttccaattttattccactgtggtctgagaaagtacttgctataagttcgattttcttaaatttgttgagacttgttttgtggctatcatatggtctaccttgaagaatgttccatgtgctgatgaatagaatgtatattctgcagttgttgggtaggatcctctgtaaatatctgtgaagtgcatttattgtaacgtatagtttattgtttctttgttgactttctgtcttaaagacctgtctagtgctgtcagtggagtattgaagtcccccacaattattgtattgctgtctatctcatttgttaggtctagtagtaattgttttataagtttggaagctccagtattaggtgcatatatatttaggattgtgatgttttccttttggactagtccttttattattgtattatgtccctctttgtcttttttaactgctgttgctttgaagtttattttgtctcaaataagaatagctactcctgctcacttttgttgtccatttgcatagaatatcttttttcaccctgttaccttaagtttatgtgagtccttatgtatcacgagtctcttgaagatagcagatacttggttggtgaattcttatccgttttgccatttggaatattttaagtggagaatttaggcaatttgcattcaatgttaatattgacatgtgaagtactattttgttcattgtgctgttttttttttttttttgcctgaataccttgggtttttttccattgtgttattttataggtcctgtgagatttatgctttaaggatttcctatttttgtgtatttggaggatttgtttcaagatttagaactccttttagtagttcttgtaatgctggcttggtagtggcaaattctctcagaagttttttgtctgacaaagacagtatctttccttcatttatgcagcttagtttcactggatacaaagttcttggctgataattgttttgtttaagaaggctaaagataggaccccagtcccttctagcttgtagggtttcggctgagacatctgctgttaatctgataggttttcctttataggttacctgatgcttttgcctcacagctcttaagattctttctttcatcttgactttaggtaacctgatgactgtatgcctaggcgatgatctttttgcaatgaatttcctaggtgttctttgagcttcttgtattcggatgtctagatctctagcaaggctgaggaagttttcctcaattattccctcaaatatgttttgcaaacttttagatttctcttcttcctcaggaacagcaattattcttaggtttggtcgtttatcgtaatctcaaacttcttcgaggctttgttcattttttaaaaattcttttttctttgtctttatcaatttgggttaattcaaaagccttatatttgagctctgaagttcttctacttgtccgactctattgctgagacttttcagtgcattttgcatttctctgagcgtgtccttcatttccagaagttgtgattgttttttatttatgctatctatttcactgaacattttccattcatacctgtattattttttgatttatttaagttggacttcacctttctctggtgcctccttttttttttgagactgagtcttactctgtcacccaggctggagtgcagtcacatgatctcagctcactgcaacctttgcctcccggactgaagtgattctcctgcttcagcctcctgagtagctgagactataggcgagcaccaccacatccggctattttttttttttgtatttttagtagagattgggtttcaccatgttggtcaggctggtcttgaactcctgacctcaggtgatctgcctgcctcagcctcccaaagtgctgggattacaggcgtgagccaccacgctcggcctggtgcctccttgattggattagtagttgaccttctgaattctttttctggcaattcagatatttcaccttggtttggatccactgctggtgagctaaggtgatcttttgggggtgttaaagaaccttgttttgtcatgtcacaagaattatttttgtggttcttcctcatttgggtagactatgtcagagggaagatctgggactcagaggctgctcttcagattcttttgtcccacagggtgctcccctgatgtggtgctctcacctttcctctaggatggggcttactgagagctgaactgcaataattgttatttttcttctggatctagccacctagtggagctactgggctctgggttggtactgggcagtgtctgcagggagtcctgtgatatgattcatcttcatgtctgtcagctgtggataccagcacctgctctggtggaggtagccggggagtgaagtggactcagtgagggtccttggttgtatttttgttaagtgtgctggttttgtgttggttggtctccagccaggaggtggtgctttcaagagtgcatcagctatggtagtatagagatgatcatgcggtgggtggggccccagagctcccaagagcttatgtcctttgtcttcggccaccagtgtgggtagagaagaccatcgggttggggcagggttaggcatgtctgaggtcagtctctccttgggtggggcttgctgcagctgctatggggaataggggtgtgaacgggccaatggagttatgttcccagggggattatggctgcctctgctgtgtcacacaggtcaccagggaattgggggaaagctggctgttacaggcctcacccagctcccatgcatcccccagccctaaaggctggtcttcctcccactgtgcctcatctgtagcactgagttcatttccaggcagctggtggtcagggctgagaacttgccccagaccacaagcctcccagctgagaaagcaggccgactcagttcctcagctgtcccacggagtctgcagtggcaatccgcctccttcaaagggcctgtgaataccctccgctttcctggtatgttcctgctgtagttcttggagcaaaatttcatgatatgggtctccacacactgctctgtccatctgagtgggagctgctagttagtcctgcctcctgtctgctattttccctgcaaatttgcatacttttcttagttgccattagtatcattatgttgtggatgcaatatctgcttgaatactactggggatgctgctttggaaataaaatacctgatactatctaaccttgacccctccactagtactgggtacctcttctgccttttcatggactgtgttcctgtagtcatgctcttcagctcctgtatcagctgttcttctgcttttagtgacttcttcctgttgtcatacagacaagcctctaaaatccatatttcaaagggaaatgatcccatttctctgtctagctgcatgccggatttctctgctccctgtcatagagctcttctgcatagttgcctgtactgggtgttttcctagttaaaccacttcacatgacctttatctctcactgttctgctgaagtgattcttacctaggccagttgtgacctctgtctttgcaaatccaagtatcacttctctctcctgactttattcacagcagcttttgacctgatgaactactcccttttttggttattgttgtgctgaatgattatgaagtccttcagatataaggtaccaaaaatataataaacatttgtatttgccatctagcttaaggagtaaaaattattaattcagctgaagtccccatgtatctcttcccaattgtatccctatcctatgcccctagatgtagccactatactggattgatatttattgttaccacacattgtttttgtatatttgctacatatatgttcccttatataagtatatagtgttgttttttatatttttagaccctatattaaaaattattcttacatatcttcttttgcaatttgctctttttattcagtattttgttatgagaccgattcatgtttccatgcatggccctagagtgtttactttcactactgtgtagtgttcctctgtatgaataatctacaatttatctgttgtcctgtaggtggtcacttacattgtttccaccttttttgctgttacaaacaatacttctaggagcatccttatggttatctcctatgtatgtttctgtttcgtaatacctagaactatagttcctgggtcataatgtatttaactagactcttcttttgagccactttgttccagacttctatgacactgcacttgtctggtttttatcttatttcatgggcattctcaatcttatttttggattctttgccacacttgatattgtagtgtcttagaggtttgtcctttgctctctatcaccgactcgtctaggtaacttacctagtttcatggttttatttaattttatttattattattattattttttattatactttaagttctggggtacatgtgcacaatgcgcaggtttgatacataggtatacatgtaccatgttggtttgctgcacccatcaactcgtcatttacattaggtatatctcctaatgctatccctcccctagtcccccgccccctgacaggccctagtgtgtgatgttccccgccctgtgtccaagtgatatccttgttcaattcccacgtatgagtgagaacataaggtatttggttttctgtccttgtgatagtttgctgagaatgatggtttccagctccatccatgtccctgcaaaggacatgaactcatccttttttatggctgcatagtattccatggtgtatatgtgtcacattttctttctttttttcttttgagacagagtcttgctctgtcgtccaggcgggagtgtggtggtgcaatcttggctcactgcaagctccgcctcctgggttcatgccattctcctgcctcagcctcccaagtagctgggactacaagcacctgcaaccatgcctggctaattttttgtagttttagtagagacagggtttcatcatgttagccaggatgttctcaatctcctgaccttgtgatcctcctgccttgacctcccaaagtgctgggattacaggcgtgagccaccgtgcccggccaccacattttcttcatccagtctatcattgatggacattcgggttggttccaagtctttgctattgtgaatagtgccgcaataaacatacgtgtgcatgtgtctttatagtagtatgatttataatcctttgggtatatacctagtaatgggattgctgggtcaaatggtatttctagttctagatccttaagggattgccacactgtcttccacagtggttgaactaatttacactcccaccaacagtgtaaagcgttcctatttctccacatcctctccagcatttgttgtttcctgactttttaatgattgccattctaactggtgtgaatcttcattgtggttttgattttcatttctctgacgacgaatgatgatgagcatttttccatgtatctgttggctgcatagatgtcatcttttgagaagtgtctgttcatatcctcatatcctttgcccactttttgatggggttctttgtttttttcttgtaaatttgagttctttgtagattctggatattagccctttgtcagatggggagatcgcaaaaattttctcccattctgtaggttgcctgttcactctgatggtagtttcttttgctgtgcagaagctctttagtttaattaggtcccatttgtctattttggcttttgttgccattgcttttggtgttttagttgtgaagtctgtgcccatgcctatgtgctgaatggtattgcctaggttttcttctaggatttttatggttttaggtctaacatttaagtctttaatccatcttgaattaatttttgtataaggagtaaggaagggatccagtttcagctttctacatatggctagccagttttcccagcaccatttattaaatagggaatcctttccccatttcttgtttttgtcaggtttgtcaaagatcagatggttgtagatgtgtggtgttatttctgaggcctgttcttttccattggtctatatgtctgttttggtaccagtaccatgctgttttggttactgtaggcttgtagtatagtttgaagtcaggtagcatgatgcctccagctttgttcttttggcttaggattgtcttggcaatgcgggctctttttttggttccatatgaactttaaagtagttttttccaattctgtgaagaaagtcattggtagcttgatggggatggcatttaatctataaattaccttgggcagtatggctattttcacgatattgattcttcctgttcatgagcatggaatgttcttccatttgtttgtgtcctcttttatttccttaagcagtggtttgtagctctctttgaagaggtccttcacatcccttgtaagttggattcctaggtattttattgttttcgtagcaattgtgaatgggagttcactgatgatttggctctctgtttgtctgttattggtgtataggagtgcttgtgatttttgcacattgattttgtatctgagactttgctgatgttgcttatcagcttaaggagattttgggctgagacaatggggttttctaaatatacaatcatgtcatctgcaagcagggacaatttgacttcctcttctcctaattgaataccctttatttctttctcttgcctgattgccctggccagaacttccaacactatgttgaataggagtggtgagagagggcatccttgtcttgtgccagttttcaaagagaatgcttccagtttttgcccattcagtgtgatattggctgtgggtttgtcataaatagctcttattattttgagatacgttccatcaatacctaatttattgagagtttttggcatgaaggctgttgagttttgtcaaaggccttttctgcctctattgagataatcatgtggtttttgtcattggttctgtttatgtgatggattatgttttttgatttgtgtatgttgaaccagccttgcatcccagggatgaagctgacctgatcatggtggataagctttttgatacgctgctggattcggtttgccagtattttattgaggattttcgcatccatgtttatcagggatattggtctaaagttctctggtttttgttgtatctcttccaggctttggtgtcgggatgatgttggcctcataaaatgagttccctctttttattgattggaatagtttcagaaggaatggtaccagctcctctttgtacctctggtagaattcggctgtgaatctgtctggccctggactttttttgattggtaggctattaattattgcctcaatttcagagcctgttactggtctattcagagattcaacttcttcctggattagtcttgggagggtgtatgtgcccaggagtttatccatttcttctagattttctagttcgtttgcgtagaggtgtttatagtattcactgatggtagtttgtatttctgtgggatcggtggtgacatcccctttatcatttttttattgcatctatttgattcttctctcttttcttctttattagtcttgctagtggtctctcaattttgttgatcttttaaaaaaaacagctcctggattcagtgattttttgaagggatttttgtgtgtctgtctctttcagttctgctctgatcttagttatttcttgccttctgctagcctttgaatttgtttgctcttacttctctagttcttttaattgtaatgttagggtgtcaattttagatctttcctgctttctcttgtgggcatttagtgctataaatttccctctaccacactgctttaaatgtgtcccagagactctggtacgttgagtttttgttctcatttgtttcaaagaacatctttatttctgccttcatttcgttatttacccagtagtcattcaggagcaagttgttcagtttccatgtagttgtgcagttttgagtgagtttcttaatcctgagttctaatttgattgcactgtggtctgagatgcagtttgttgtgatttctgttcttttacatttgctgaggaatactttacttccaattatgtggtcaattttagaataagtgtgatgtggtgctgagaagaatgtatattatgttgatttggggtggagagttctgtagatacctattaggtctgcttggtgcagagctgagttcaagtcctgtatatgcttgttaaccttgtgtctcattaatctgtctaatattgacagtgggatgttaaagtctcctattattattgtgtgggagtctaagtctctttgtgggtctctgaggacttgctttatgaatctgggtgctcctgtattgggtgcatatatatttaggatagttagctcttctcattgaattgatccctttaccattatgtaatgcccttctttgtctcttttgatctttgttgatttaaagtctgttttatcggagagtaggattgttacccctgctttttttttttttttgctttccatttgcttggtagatcttcctccatccctttattttgagcctctgtgtgtctttgcacatgagatgggtctcctgaatacagcacactgatgggttgtgactctttatccaatttgccagtctgtgtcttttaattggggcatttagctcatttacatttaaggttagtattgttatgtgtgaatttgatcctgtcatgatgtttgctggttgttttgcccattaattgatgcagttttttcatagcatcgatggtctttataatttggcagtttttgcagtggttgttaccggttgtttctatgtttagtgcttccttcaggaactcttgtaaggcaggcctggtggtgacaaaatctctcagcatttgcttgtctgtaaaggatttcatttctccttcacttatgaagcttagtttggctggatatgaaattctgggttgaaaattcttttctttaaggaagttgaatatcggcccccactcttttctggcttgtagggtttctgccgagagatccgctgttagtctgatgggtttccctttgtgggtaactcgacctttctctctggctgcccttaacattttttccttcatttcaaccgtggtgaatgtgacaattacatgtcttggggttgctcttcccaaggagtatctttgtggcattccctgtatttcctgaatttgaatgttggcctgccttgctaggttggggaagttctcctggataatatcctgaagagtgttttccaacttggttccattctccctatcactttcaggtacaccaatcaaacgtagatttggtcttttcacatagtcccatatttcttggaggctttgttcatttctttttactctttttttctaaccatgtcttcttgctttatttcattaattaatttgatcttcaatcactgataccctttcttccactagatcgaattggctattgaagcttgtgcatgtgtcacgaagttcccatgccatggttttcagctccatcagtcatttaaggtcttctctacagtgtttattctagttagccattcgtctaaccttttttcaaggtttttagcttccttgcgatgggttcgaacatgctcctttagcttggagaagtttgttattactgaccttctgaagtctacttctgtcacctcgtcagagtcattctttgtccagctttgttccattgctggtgaggaactatgatcctttggagaggaggcactctgatttttagaattttcagcttttctgctctggtttctccccatctttttggttttatctacctttggtctttgatgttggtgacctacagatggggttttggtgtagacgttctttttgttgatgttgatgctattcctttctgtttgttagttttccttctaataggtccctcagctgcaggtctgttggagtttgctggaggtccactccagacccggtttgcctgggtatcaccagcggaggctgcagaacagcaaatattgcagaacagcaaatattgctgcctgatccttcctccggaatctgcatcccagaggggcacccatctatatgaggtgactgttggcccttactgggacgtgtctcccagttaggctacatggaggtcaaggagccacttgaagaggcagtctgtccattctcagagctcaaacaccatgttgggagaaccactgctctcttcagagctgtcagaaagggacattgaactttgcagaagttgtctgctgccttttgttcagctaagccctgcccactgaggtggagtctggaggcagtaggccttgttgagctgtggtgggctctgcccagttcgagcttcccagccactttgtttacctactcaagcctcagcaatggctgaggcccctcccccagccaggctgctgccttgcagtttgatctcagactgctgcgctagcagtgagtgaggctctgtggacgtgggacctgccaagccaggcacgggagagtatctccttgttttccggttgctaagaccttgggaaaagcgcagtatttgggcagaagtgtcctgtttttccaggtgcagtccgtcacggcttctcttggctaggaaagggaaatcccctgacctcttggcttcccggttgaggtaacaccccaccctgcttcagttcgtcctctgtgggctgcacccactgtacaaccagtcccagtgaggtgaaccaggtacctcagttcaaaatgcggatatcacccgtctgctgcattgatcacgctgggagctgcagaccagagctgttcctatttggccatcttgtattttattttattttttgagacagggtctcgctctgtcacccagctggagtgtagcattgcagtcatggctcactgcaacctcaaccttctgggtttaactgatccttccatctcagtgctcccagcagctgggaccataggtttgcaccaccatgcctgcctcatttttctttttttagagatggggttttgtcattttgcccagtttggtctcaaagtcttagactcaagtgatccttctgcctcagcctcccaaagtgctgggattataggcatgagccactgtgcctggccctagttccatggttttaaattccacctacatactgataactcctcagattctatctctaacctgacctcgttcgtaaactccaggttggtctctctttggacatctgaaagggatctcagacttaacacagcaagtgggtctcttgatgcccagctcttccccctttctctacattgcatggctggagccatctcatgcttcagcttttagctgacatgtatctccccagaaaagccttgtcggcccaccccactctctccctgtccattatctattatatcatcctgttttattttttgcagagcagttgtcagtaactcttttttctttggttgtgtgtgtgtacatatatatatgtacatgtatatattctgtttatgtcccctagaaaagcttcttgagggcagagactttgcctttgttcactgttttatctccttttcttagaatggttgccagaacatagagggtagtcagtaactatttaaccctgttatcttccgccagagttgtagattcaaattctcacctgtttttagaagacttctaaaccttcttagccttgacttccttagtgctaatgttgcagcttttgtagttcagcaagcgggaggaaatggcacactggctttttttccccgttgctcagtgagcaggagggagggttgcagtgtaaggattcctttggtgctgcttcaccagccggaaatctctgtgggtgctgtgtcctctgcctggggcctcattccaccgagctcactccgcccactcagcctggcaggctgtgctcggcttgtgccttggcctggatcctgcgcccgctgagggatctgcactcagcccatggctccactgggtgtgttgccagcagcttctgcattgggtgtcgttgtctagatgaggggaatgtgggtggtgcccgaaaactcagagatgtcagtaatggcagagtcccaaggggtgttacagctctcatccggggagtcccaagatttgacctcccaagaaatgttgcagctttgtattgttcctgccacctgcagcttggcgaacaggggcatgttacagctcagtcggtcccaccacccgcagctcagtgaatgggtgtgtgttacaggttggcctattctgggttcttctcctgcgaccaagaggaataagaggaataaggtacatggacactggagagtgaatagggtggagaagaatttcattgagcaatagaaggaaagctctcagcagagagggggcccaagagtgattagccctgtgtgtgagaggggacccaaaagaggtttgccatctgtggggttgagtctgggatttttatgggctcagaatgggggagtgcgtgctgattggttcacgggtcggcttggaaaaagcaccatttgattgcctaaaaggcatcgaggaagttctcactctcgttgtggactccacctgcaactggcagctcagttttcagtctttaaactgtctttggcatgaggttgggtttcacagggacccatccctgtctgcctaggaatttgtctgtctccagttgctgtcactaagccacacattgcactgtctcttggattcattaagatgtctttcggttgtctcaatctcatattgagattgagattgttgactctatcttcttccccaaagccttttttcctccccacacctttaaaaatttttcataaatatttccatctaccctgcggttcacctcccttctaccctcttatccaatatgctattacttgttcttaccttcttcatagttcctgcgtctttctcctttatctagccattatcttgcttgaggcccattttgcaagctgttatctgtctccactctgtctaggtgatagtttttggctccatagctttaaataccatccacattcagatcattcctgagagtctgtcttcatcctgaccacactcttgaactccagtttggttgtgggcttctatgataacatactatctgatttttatcttactttttggctagaccttgtcaatctcattttctggatcttcattctctactagactctatgttgtagtgtctaggattttgtccttgactctcctctgtgtatcttcccagcttccagctttggtctgctaccctgatgctcatctttatcaaatacaatcaagtcatgcactgctttgcttaaagttcctcagaggctccctgctgcctctgaagtccaagttctttatcatgggcaaaggcattaagaatgagccccctgtgtatttcaatttttgcctctcctccaaaggatctagaagaccgttatctctccttgtagcccctcaacacagaaggctgggcttttgctcatgctattttcttggtgcacagttttctttttccgtattgcttacctcccctgtaaacatttgctcatttaaaaagatgagtcagttgcccccttttcagggaagtcttccgtgatacattcaggcaggagtaagaaattccttctctgtgttctcctagcagtttattatcttcattataatacttggttcatttatccaacagttatttattgcttgcttgctatattctggaaactattctaggcattgggattagaacagtaaacaagacagatgaggtcctcattttcaagaagtctacattacagagcggaggaaagagaaaaaaaaacaagtcaacaaactatattattttagatagtgattagtgatactaagataaaataaaaccggccagtgtggtaatatgatggagtgtgtgtggtgtggagagggggagtggttgtgacacttgagagtgagtgaggtccagtttgagttgagacttgaaagattagaaggagcaatccatacagagatctgcaagaggtacattctaggcaaaaggaacagttaagtacaaaggccttggagctagcctgagcttggcatgtttaaggagcacatgcagcctagtgagccaggagcataatgagcaggggaaaggaaggagtgctgtctgacataaggcccaagagatagacggggccagatcatgtagggccttataggtaagatttgtcaattagatggggccagaacatgtagggccttataggtgagatttgtcagttagacagggccagatcgtgtagggccttataggtaagatttgtcaattttaagtatagcagaaagccattggaagagttttatgtgagggagtgacatggaactgattcatgtcaagaattattacttgggtttataatgaggagaattctaggaggacaagattaacagcagagaccaattaggagttgttacctactgcaaatgaccactgttacctactgcaaatgaaaaatgttggtaccttggattactgtggtatttgtagtatccatggagagaagtggagtgatgtgggatgtattttgaatgacaagacttgctgatgggttgaatgtgttgggcttagggaaggatggaatcaggaaaaggaccccttggcttttcttgggtaattttgtggatggtggtgccatttacctactgtggatgactagtggtggtggtgatggtggtgatgagaaagttctatggaggaggaatcaaaagttgttttaagttggatatgcctcttaagacgtgaaagtatggatgaccaggaggaagctggatatgtggttctgaaggtcaaagatggagattgatgatttggggagtcaccaacttactcatggtatttgaaagctataggtctgggtagaataacctagagtcagagaataaaagagggctaagggtgcgtccttggacattgtagagtttagaggtctgatagaggaggagaggtggggagggaagaaggagtatagatgatagtaggaggaatgtttcaagaaggaaatgaactgtgtcatgctactttgagttccagtaagatgaaggcacatatgtgaccactggatttgactctggagttcactgtgaccatggtaaaagcacctttagggtattgaagtgaggagaagatggatcttagttcattactctatttagctgcttaggtatctgtctcctcctctatgtgctagtccttagtttatttctagggcttagcatataaatagatggtgaataaatgtttgcctgcaggtttgagttttacaatgcagtttaaagaataatatactgttttacccttatttagaatgcttttgtactattgacccttgccactagtttgtgtcagttcaaggaatataatcatgtgactaataaaacgtgatgagaaaggcaagttgatgttagtagaggttcctagtgcatcttgaagccatcatgctgtagtggaaaagggccattctttgatttggaaggcctgtctcaggctttggctgtgctatttagcccttgagaagggagctgggggcaagctccttacagtctctggattgcagttccttggctgtcataaatggacaatattaacaaattcctcttacaagatttttgtgagcagcaaatgaataaatgcaatgaacatcctttgtaagtaaaaagatactctgtaagggcaattttaaaagaataattggattatccatttcattactaacttataaagtacattagatcagagtgtcatgaaattcatatttatctgtggcatataaatggcaagaagttgggtgaggacataagtcactggaaaatgtgatacttcttttttttttttcctaaaatcccatattcttttcttttcttttctttctttccttttttttaaaatttttttagtatttattgatcattcttgggtgtttctcggagagggggatttggcagggtcataggacaatagtggagggaaggtcagcagataaacacgtgaacagaggtctctggttttcctaggcagagggccctgccgccttccgccttccgcagtgtttgtgtctctgggtacttgagattagggagtggtgatgactcttaacgagtatgctgccttcaagcatctgtttaacaaagcacatcttgcaccgcccttaatccatttaacccttagtggacacagcacatgtttcagagagcacggggttgggggtaaggttatagattaacagcagcccaaggcagaagaatttttcttagtacagaacaaaatggagtctcctatgtctacttctttctacacagacacagtaacaatctgatctctctttcctttccccacacttcccccttttctattcgacaaaaccgccatcgtcatcgtggcccgttctcaatgagctgttgggtacacctcccagatggggtggcggccgggcagagaggctcctcaattcccagacggggcggccgggcagagacgcccccccacctcccagacggtgtagcggccgggcgggggctgccccccacctcctggatggggtggctgccgggcggagacgctcctcacttcccagatggggtggctgctgggtggaggggctcctcacttcccagacggggcggctgcggggcagaggggctcctcacttctcagacagggtggctggtcagagacgctcctcacctcccagatggggtggtggtggggcagacacactcctcagttcccagacggggtcgcggccgggcagaggtgctcttcacatctcagacggggcggcggggcagaggtgctccccacatcccagacgatgggtggccgggcagagacgcacctcacttcccagacgggatgatggccgggaagaggcgctcctcacttcccagactgggcggccgggcagaggggctcctcacatcccagacgatgggcggccaggcagagacgctcctcacttcctagacggggtggcggccgggcagaggctgcactgttggcactttgggagaccaaggcaggcggctgggaggtggaggttgtagcaagccgagatcacgccactgcagtccagcctgggcaacattgagcactgagtgagcgagactctgtctgcaatcccggcacctcgggaggccgaggctggcagatcactcgcggtcaggagctggagaccagcccggccaacacggcgaaaccccgtctccaccagaaaatacgaaaaccagtcaggcgtggcggcgcacacctgcaatcgcaggcactcggcaggctgaggcaggagaatcaggcagggaggttgcagtgagccgagatggcggcaagcagtccagcctcggatcagcatcagagggaggctgtgtggagggggagggggaggaggagggggagggggaggaggagggggaggaggagggggagggggaggaggagggggagggggagggggagggggagggagagggagagttttttttttttttatttgagacagaatctaactttgtcacccaggctggagtgcagtggtgtgatttccgctcactgcaacctccgcctcccaggttaaagtggttctcctgcctcagcctcccgagtagctgggattacaggcatgtgccaccatgctcagctaatttttgtatttttagtagagatggggtttcaccatgttggtcaggctggtctcgaactcctgacctcaggtcatccaccctccttggcctcccaaagtgctgagatacaggcatgagccaccgcacccagccaatgtgatactttttaagaaacatacaggaaattaatttcctttggctgtgttctcttgtctttcccagaaaaatttaattgttctgttagagccaaagagtaggctcttttacttcaagatctagcaatcaaatctagcactatagtagtctgtttacccccagggttgtgtatgtgtgaaggaataaaatgtagttagtattgtgtttttttctttttttttttaagtgattaagtaaatacattgattaactcagtttgacacactttctcatggtgattacagttttcatttttttttatccataggagatatcaagacctctagtagaagcctaaaaccgtgatatttctgaactcttctatatgcgttttttttttttcctgtacatacataacccaggagaaagtttaatttataaattgggctagtaagagaataacaacaataattaattagaaaaaagaacaattataaaaatatactgtcatggaaattatgtgaatgtggtctctctctcaaaatatcttaatatttttggaccacagttgaccatagctaactgaaattgctgaaactgcagataagggtggactgctgtactcattttatttttatttctagggtaaaaatcatggtaagaaactccgaaattactatgcagcaaatagctgtcctcctcctgctagaatgagcaatgtggtcgagcctgcagctactccagttgttccagtccctccgcaggtgagacatgtgtgtcagggtgaagcagcattagggtggaagctgtaatatgcacaaatggttatagatgacatttgtcgtccatgtgtccattagggtacagttgggaaaataatcctgaaagatgctgcttggtacttttaactccttgaactacagtgctggatttaatgcaggctattgttacgtgagtctttatacatttcttaaaattctgggctaaataggccaggtgcggtcactcatgcctgtaatcccagcactttgggaggccgagacgggcgaatcacgaggtcaagagatcgagaccatcatggctaacacggtgaaaccctgtcccaattaaaaatacagaaaattagccaggcgtggtggcgggcacctgtagtcccagctgctcgggaggctgaggcaggagaaaggtgcgaacccgggaggcggagcttgcagtgagctgagattgcaccactgcactccagcctgggcaacagtgcgagactccatctcaaaaaaaaaaaaaaaaaagaaattctgggctaaatgatcctgaatgtctaggctaaccccaaaatgaaaagagagattttcaaacatgtgttcctttattgcagttcatcccatttatttcagattttgccttccagttgcaaaattaggtgtttgagattgcttattacttacctctattcagagagcctgtgtaaacatgttttgaaccttgctatcatgaaacagacttgaaaaccaagttcttctgctctttggaagatagaacaggtgctttaggcaagatattcctgtaccttagtagcctctgaaacatggagtctactcttaatctgtctttgaagtgttatatgtccataaaaacaatacagtggtcataaataataatagttataatagagtacatatcgtgccaggcactgtgctgagcatgtttcatacgttgtttcagtcagggctgggactatggtgaggtgatggatgcactaaacttgggcataaaatttaagaaggagccaaaaaactcagtaataaagatagatatttaatacaatattttagaaatgtaaaattgatttaaaatagtggtgaacaaaacattaaaaacttaaaataagtattactgattttccttttgccccaggctgcaatatgacttggtgtggcagtgttgttactgattctgaatgtaaaattttggtattttattcatccttaattttttgcattaaatttaattttttaagctgggtgtggtggtgtgtgcctgtagtctcaggtacttgggagggtgaggcacaagaatcacttgaacccgggaggtggaggttgcagtgagccaagattgtgccactgcattccagtctgggtgacagagcgagactatctcaaaaaaataaaaagaaaatgtaattaaaaaaattccatgaaagtattattaatcttgattgctgagttttttttgatgctccattaaattctgagcccaaggcaagtgtctcacttgcttcattttagtcccaggccctgacgtcatttaatgcttgcagcgacttagaggtattggccatattactcaaattggtgtccataggtcagcagtttcagcctcactgaagtttattagaagcttagatgagctaagtaactttccatggtgttacaggttttgtaaagtggtggagcaagaatttctttctttttttttttttttgagatggagttttgctcttgttgcccaggctggagtgcaatggtgtgctgggctcactgcaacctccgcctcctgggtttcaagcaattctcttgcctcagcctcctgagtagctgggattacaggtgcctgccaccatgcccagctaatttttgttattttagtagagacagggttttgtcatgttggccaggctggtcttgaactcctgacctcaggtgatccacctgcctcggcctcccaaagtgctgggactacaggcatgagccaccgtgtccagcccaagaatttcttttgatcttagacctttgcttttaaccagtttgtatcattttacttttctgagtgttagtttttagtatttaaaagtgtgggtagcaattctggctgttcttccttctcatggatttgtggggaaaatgagatatataaaaaaccaaatcagagaacaagaagatacccagagagatcttcaagctgcatagttttcctgtcactggtttctgaaggctgctctagaattgaatagctacccccagtgggggctgttttcagtgggctccaccctcccgggcaggcagcctaagcctttcttcagagcataccccagaaaaaacttcccttccaagtgaaatgatgctgttttctgcaactgttgctgatatatgtggtttccagaatctttatcatgtactatattattctcttctggccaaaacctagtgtgtcattttttttgttaacctaatacttactgaatgcctactatcttctgggcaatctgttaggctctctttaacatgttattccacaacctgactacagttgtctggatttgctacttatttttaatttttttccggattatatctgtagctagtttgtagactctttgtggacaggggctctttttaaaaaaatatatgactatgtatccctcctggactagacagcaaccctgataaagagttaacagtcactaaatgcttatcgatggattctgcagactttactgtttcccgtaatgtgattttaggccttacctattttacccatgacttactgtcctaaatctaaggtttttaaactcttaaaaaatgtcttcagtggcgacagcaactagccattcactaatttggtacctaagtgattataatgcaaaaccatgattaagtatctcccagcctttttgttttcctggattgaattattttcttgatgaagcttaatgcttgtggtcatgccatatcctttggttgtttttcagctcttagaaagacctttgaggagaaggaggaaactctgtattttttttaactttgtttcttcttgtgtctttgatgtcagatgggctcctttaagccaggaggccgagtgatcctggccacggagaatgattactgtaagctctgtgatgcctccttcagttccccagctgtggctcaggctcactatcaagggaagaatcatgccaagaggctgcggctggcggaagctcagagtaactcattctcgtaggtattgccattttctctgaggccaaagtgttatgtgagattgactgtctttaaagaaaaagagtagaaagggattcttgtttagaagactcactcttttttaaacttcttttctccagggaatcctcagagctgggtcaacggcgggccaggaaagaagggaatgagtttaagatgatgcctaacaggagaaatatgtatacagtacagaataattcaggtatcttgtctgtttccacataccttgggtacattctgtacctagtctcctttgtttttatttcttttaatgataatagatagccctgagaatttggagttagtcagtgttttattgaattagtctagtggcggcctttcaggctggtgtgtatttcaggtctcatttatttactttattgttgtaaataatatattatttattttggttttacactatagtctgtgttttaggatctcttatctttgtccccttatgtttgtttatatttccagctgagaaatgtaaaagacatgataaaaatgggctacttggtttaaagttgtaccatgttaaagaaaagattctaaagcagtgttttttaaccaggctagtgaaacagaattacccaaggagcttttacaaaatgcctgaaccatgacttagagattttcaatgaataaatttggagtaggacccagacatatgtgtgttttgaaaatgcttgcttgatgcttctgatatacacatttagttcacaaacactgatttataggaataaattctgcattttctgattgtcttcagtagggagagtgggctgagtagtccctcaccctcccctctacttcagcctctgattcatgcacatgccagcagaggtcatttacttgaacagtgaaacaaatagaaaacagagctaactgaaaagccagagaagcctactaaaaaaaggacatatagaaagcacaattcaggccaggctcctgtggctcgtgcgtgtaatcccagcactttgggaggctgaggtaggtggatcacctgaggtcaggagttcgagaccagcctggccaacacggtgaaaccccgtgtctactgaaaatacaaaattagctgggcatggtggcatacgcctgtaatcccagctacttgggaggctgaggcaggagaatcgcttgaacctgggaggtggaggctacagtgagctgagattacaccactgcattccagtctgggtgacagagcaagactctgtctcaaaaaaaaaaaaaaaaaaaaaaaaagcacaattcattatgattaagaaaagtctaaacatatattaataattgtaataaatgtaaaattaccaaagtccaaaaaatgttaaattggatgaaagaaatccatctgaaatgaaagaagctgggatagctgtattaatatcagaaaaataaattttaggatagattatgttctctgaccagagtacaatgaaatgagatgtcaacaacaaaaatagaaaagcaaacaaaatttccatttgttttccaatttaaaaacacttctaaataactcatggttcaaagaaacaattatactggaaattaaaaattcctacagtgaaacagtaatgaaaatatattaacacttgtaggatgcagtgaaagcagtattttgagaaaagtattacctatatattattatagtggaagtgaaaagcataaagttaacgaactaagcgtccagcttatgaggtcagtaatgtaaaaagaagaaaatgaaatgatcagtaatgtcaccaacacttttgcagatttcattctagtctcttcatatgtatgacttctttaaaatagaaatgggatcctagtttgggatattcatagtttacttaatagcgtaagagttttctatagcattattatatttagcaatggcatagttttccattgcattcattaccatactttctttaatcctatttttgaatctcttcttccccctaaatttttgcttttataatcactgctgagataaacatattgctattaaatctcagtgtgaaaattcttagtattttcttaggataattcttacaagtagaatttttggattaaagggttagcataagcataagacttctgatataatgcttggaaattaaagtatttttaaaagcgtattcacttttttagagacacagccatttggaatttgggtttggctctacagcaatttttctgacaatggttggaggaatcattttatctttttagatcgaacctgtgtaaaattgtaattttaaaaatccattaacttcacattcacttaaagctaagaatctgtgaattttataatttgaacttagaattacaaattacagtgataattggtcaggttgtcattcacttaatgaatattttgaatatattatttttatctcttgctttagcaggtccttacttcaatccccgctctcggcagagaattccacgtgatctggccatgtgtgttactccaagtggccagttttactgctcaatgtgtaatgttggagctggcgaagagatggaattccggcagcatttagagagcaagcaacataagagcaaggtgtctgaacagcggtacaggaatgagatggagaatctgggatatgtatagtgattatcatattaagatagagcagcttttcctgcctgttgtttgccttttgtcaacttgccctgctttgtggtctttttgatatgagtacattcctctgcttaatgttaatacatgtaacccacagtggtaccatgagatgtcaaaacctgggggcccgggggcggggcggggggaggtgggtgtgaagaacgtgcttcttaggtcataacgcttttgcagggtcaatggtgttgagccgctcatagcatgtgacctacctaccccatcagaaataactttttatcttgctcaagttctggtcaactagtagcctgacggcttagaactttgactatttaaaagtttcattttcttttgcaattttagttttatgtactgttaaagaattgtactgaattctttttagatcacagtaaaaataggttggcagagatttcagtttcccagggcttaaccagaaccgccacctcaatgcattgtcagtagaatacattattagaaactgttaaggtctttcccgggacatttttttctgccattttcttttgcaattgtagttttatgtactgttaaagaattgtattgaattctttttagatcaaagtaaaaataggtcagcagagatttcagtttcccagggcttaaccagaaccgccacctcaatgcattgtcagtaggatacattattagaaactgttagggtctttcccaggacatttttttttctgtatcatgtctccccatcattgaagcgcaaattttcttgaattcaaatactcccaatgagcttgtatacttccaaacagctaaacttgatttccagttgtggatttcacacatataattgccgccttcttccctcctcttttttcccccctagttgaatcagcttgtctaacaagcccattttcatgccccagctgtgctgtgggttttccaagcctcatatttgaatattcaatgagtttaagatggatatgatttcaaaaaatagggccgggcgcggtggctcacgcctgtaatcccagcactttgggaggccgaagcaggcggatcacgaggtcaggaggtcgagatcatcctggctaacacagtgaaaccccatctctactaaaaatacaaaacattagccgggcgtggtggtgggtgcctgtagtcccagctactctggaggctgaggcaggagaatggcgtgaacccgggaggcggagcttgcagtgagccgagatcgcgccactgcactccagcctgggtgacagagcgagactccgtctcaaaaaaaaaaaaaaaaaaaaaaaaaaaatatatatatatatagatatattttccagcagtttttaggaaacaaaggtgtgtttgattttccaatttagagttacttcattgatagtaacatgcgcttatatcatgatctaaaccataagttcagattgcttgatattttgttttgccagacttttttgataatctgattcttacggtttacttacattttcctctgtcttgccagtctggtggccatcctgaaaaatatcaccacctgctgttttatacacagaggaattttttaaaaagcaaataaagtttcactatcttcgtttccagtagaaatatacacgaactatggttttattctttgtaattcggctttcttgaagatactaacaagtatatgatagatcactttggcatctgataattatatcagtattattatttttgtttttttgcgtttaaaataagaagttgtatgaacccaggaggtggaggttgcagtcagccaagaatcgtgccactgcactccagtctgggcgacagagcaatactccgtctccaaaaaaaaaaaaaaagaagctataatatatatctagattaactaatggagtgctctgtgaatattcattaactacattttatctatttactatattttatatgggtaagaccagtggtcatccgtatttcttttgaaagcccacttgatcaggaagtttatattttaagcagtatgtttgcacaatggtcagttcacatttgattgcttgtattactaattagaggtaaaacttctattttttcttgataattctgtaggcaaaaaaaattggggaaggcaaattacaatcattcttcttctgtaatactttgggacaatttttaaacaactcagacccatgtttaaaaacgagttttgtgtgattaacccttgtatagtatccagttactgtcttctcttgaagtggtggttctttgagaagtagaattattttgtaacttttcttctcccagaaacagaagaatcaaatactattctgttaggattctatctagacctgtgactcttagtataataacccttttattattattattattattattttttcagtaatctataaagtagagttgcttagttttgagcaatttagggcttttcttattggccagtaggttattcattttgctgctaaatataattttttggttaattttaacattatagtgctggccgcttggttctatgattacctaaaaatctagtttttttcctccataggtagatgtgtgtgtatgcatacccccacacacacacgtacatatatgttgtcatagagaggtatttcaacccttatttcaaataacagtagaagatacgaacatgaatttatattttgtaaaaatgtcattcatccactttgttttccattggaaatagttttataagaagggttccccttgctctctccacttaacaatttcattatatacgtagaaaaagcagccgacttaagggcttgatgttttttcaggccttgtggattcaggtttccagtttcccagtgcccttaatggatgttatgaatgcataagcacattttcttttaaagaaagaagttagatttatagtgttatttcttacttgctatatttctttgcactaaaaaagagctatgtgtttgttttataggacactttagtaccgtattgcctacaataactcagtttgctccttaaattccaaactctgggaagttgataaataacttccatgatcacttgtaaaagttacatgcacatctgaaaaaaaatcacaaatctctatgacagtaggttatgttttgagcttgttaccttgcagtattcttctctgttccataggtgaaaacaaagggtgacagaggttatcaggcaggaaatgcctaaatagatacatctctgcatggtacaatttctcatattcatgtattccataaacagtgttttttctctgtttaagcagactgttgtttcttctgagtcagtgatatgtgatcttcgttggtttcattttgtgaagctcagtctgtctctgtaacatactttaggatttgcaccttgtgctccccaggaattatgttagtgtccttttctatgctgtcttcaaggatggacagaggcctaaaccacaacaacaacaaaaattagaaaaaaaaatacttagatttcggtaatcatccataggaactcatagcatcagtctcttttctctgtgaataatatctttgtgtaagttgtcataaaaaatcaacgttagaagatgacaattagaattcttcttaggtattgagggtaagaagttgtaaagaaagaaaattcgtgtttcaactaaaagattggattgcatatacctttgaagtggttttgtaaaaaaagttcagttactaaactgagtgtgccctgtaatccttttgagtgcactgaagatgctttgaaaatactttgttggtcttcacattgtgcatcatgtcctgcaacttgtaaatatgtgcatgttgtttatgtttgtctgcctgtctcttattgcactaaattctgcaaggtgaataatttttttataccatttatttggaaaaagttcctcctccaactcttcttcactgaccttttaattagttggtaaacttagaaaaccaggtaggatttttgaagccctgagtttaaaagaagaatcgtggctatttgacatcatccttacattcccctgacttaaaaagctaacaagaagcacgagatcttccacctcattttagaaagcttttctacagaactatatgcttgcttatagctacctatctacagtttgaacagggagaaagggagatatgtatgtctggttacatcttccttcactcttgaattggctgggacagcaagcaacaacagtttgaggtccagtgacctacgtaaaatgagtgtcgtttgtgtcaggggacacatgtaactgtgcaacatggtattttctacagggagggctaggaagggtggttttggaacctaacctactttgtgtcttcattgtcagaactaaggttggaaatgccctttaaagaacttggtgaggcatatgctaggacaatagagctgctttagaaagaaattgagacatgttttgtcaggacagataaaagtttaatgcaggcttttgaacagatgttttaaaacaaatttgaccttaccaactatttttttcttctagccaaatcattgtacaggagtttcatatatgataaaaagtgttttgttattgtttttgctttcttggcaggggagaacccctaccattgtgagcagttactgtcactctggctgaatggacaaatagctgtgtaaatagcttctcataaaacgcttctactgatagctgtttgactttttcttcccgttatgaatgggaggaacatttgtaaacttcctttctgggtagctaccaaaaaacgtactggcttatggtcccatgtgaccttgtctccgttaagcccagaatctgagtgcctttagcaagtgttagcatttcacagagagaagagagacagaattattgctattaatcaccattcataaataggagcttggaataacaaaggtctgtgtgaattctgttctacgtcttttttttcccttttttaaataaatgtcaatttgatatcaagtaaaactattgtcattattgatcagaaaccatacattctgaaaatgaatccagttttcccaagctggcagaagtcagagatcatttttcaccttgatctgtgttgcgtttgtacttagtgaatggcagtgtggttgattggaagagcttgacactgatgtttggaaaaattctttattctagtggtcattttcaaacttgtcttctgtagagaggggaaaaattatgtatttgcagctaaagcgaagagactggcacaataattattaattgtgttagttcatttctatattaaatgaagcatcttcacaaatcaggtttgaagccattaaaagcaaaattttccctagtttaattaatttaaaattctaaattgcctgactacttagaatcttagaaacgccctgctagactgattttattatagaaatgttaacatgttcctcaacattttctcaagaaaattttcagacatatatcaaagttgaaaaaactttgcagtataaccactgctagattctgccatcaacatttgactatacttgtattgccatgtatctgttcatattctctatccctcttttcatccatcgatccatcagattttttttttaaagaacattccaaagtaaattttaggcaatacactgccctaaattcttagcatgggtgtcattaattaaggtttagtattcgtttaaatatctattttgaaagtggtgtatgaagttgataatctgagccaattaacatacttttttttttttcctcctgtggacttttgtcttccagtttctctttttgtgtgtacttagggtgagggaggacaattcctttcaaacacaagtttattttagaattggtcatttttaagtgcttgtcataaattttaaagtttcaatataatttttcttttccccacttctgataatgtatttttgccaaactatgcagcttcttcaaaaaactgtaaattactgattggggtttatgaaatcagcgaatacctcatttcaatctgttgctgcttttctccctcttgtcacttctcctttcactactttcagctgctctaccagaaggtagaggggagtaaagggtcaaacccctatataattagctgttttaaacaactctaggagagcagattaagtagcttagtaagttgaaactattaatttttctaaagaatttgatttgaattccttgagaattgtaattatccacacttcctccagctataattagcagaattaaaaatgattgtactgtacaatgagttgttgaaattgtaagccttagtaaccatctttagctttattgtagtcatgtttagaaaaaattatttttacatatgcctttatttttatgcccactttttgtggataagattctttagataaaatctaaagaattttaagtgactttctccaggtcatgaagattcaatgggtagaattgaatcagaattgaaatgttccagattcatattcttgtgtgtgtttgataaaattcatggcttccaaagtaactgaacacttcctttgggcccttggagggaaaatccatatttttactaattacacttttttttttagacatctggcagttctttgaacttaaacatattctcatggccatagttccaaattaagcccgacgcagttgctaaaaatcttgctgcactgttgaatactaataatgcaacatttattggatgtttttgcattttgatgaccttcatgattcatttataagtctttgtaagtgcttaagtgaccccctcactagtgaaaataataaatgttctatatcatttattattatttgtgtattctctacatgatatatttttttaaggaagagtaactccacatgtcagaatgagtgatattatcctagggcaaagcgcaaatagggcagtttgtttctactctgcaaatatggcatgtataggaacaaaactcttttggagtggctggtcattgttctgccctcttttggtacctgagtacctttctggggttttgtaaatcgtgtgtcatttgtaagaatttcacgttaactctgcgttacttggtgttcacctgtggtatccttgactgaccataatgatttagtttgggtatgatgtgtctgctttgaaatgccttactggagtatgtcagatcctgctttaaagcattccatatatctgctgggacaataagttgcttctccttggaaatatgctctagattcagaagcaaaaccgattttgctttcaccattaaggttgcattttaatgcagttattgttttaaattagagaataaaatgtaaaaccaagggaggctttagaaccctttattgaatggcatggcaaacttttaaaactgcttttgctatttcactagaactatctttgataaaggatatagctaaaaaatgtcagcccaaactgtgtgtaattagggttgtttattaaaattttctctaaatgtcatacagaggcttaagatctgtgtatgctgttgggtcggagtgccagtcactgctttggaagtctgtgttctggggctgcagaatgacaaacgtgtcatgggattaaaaccaatcaactgtgaattgtgaaattgaaactactctttcggttttattttctttagcatattgagtatagaaatctgaaacttatttaaaatttatactgcttttgttgatggctcattttggctgtgtatcctcacttatgtactgatttctgataaaggcttgacattattataacacgcattttgtgttccagtttaataaaacggtttctgagtcttgtctgaa

SEQ ID NO: 25 - DNA, 90134 bp, Homo sapiens
aagaagaggtagcgagtggacgtgactgctctatcccgggcaaaagggatagaaccagaggtggggagtctgggcagtcggcgacccgcgaagacttgaggtgccgcagcggcatccggagtagcgccgggctccctccggggtgcagccgccgtcgggggaagggcgccacaggccgggaagacctcctccctttgtgtccagtagtggggtccaccggagggcggcccgtgggccgggcctcaccgcggcgctccgggactgtggggtcaggctgcgttgggtggacgcccacctcgccaaccttcggaggtccctgggggtcttcgtgcgccccggggctgcagagatccaggggaggcgcctgtgaggcccggacctgccccggggcgaagggtatgtggcgagacagagccctgcacccctaattcccggtggaaaactcctgttgccgtttccctccaccggcctggagtctcccagtcttgtcccggcagtgccgccctccccactaagacctaggcgcaaaggcttgggtaagttgacctcctcgcttttctccccgagccaggttctttggaggcttggtagctgatttcagggactgagaatttgaggacatggaatatttgataaccatcctgctcctgtaccaggaagagaaattctgtaatgaggaagtagtaaacttggggttttcgtggataaacgtgcgctgttttctgttttacgtccatgaagagttttggctttccattttgttgtgggttacaaaaggttttgagacttagttcagataagttgtgcagttttaaaacgtatttaagatttgcatattttagtttaacaggactaggtgaaattggaaattagtttcagaaaaccagagtgtcttatttgcttagctattggacatcacctaaaaaattcattcattcttgttttttcacatcgaatttcattactataaattaaggaacattttatgtttaagaggacaaaaacgttattaacattttaaaaaatgagagttttgattcgaatcaataactttttatcagttttgtgcccctgctgggcattttgtaagccttgacaagcataggcaaatgccctacgtccgtccctgtttttccaagtgctacatttggtgacttcaaaaacagtcattgaagcttgataattattgcccccttctgtgagctccaagttacttgtgctctgtttttgcacttcgggcattcacattcccactctctctctctttttcttctttgagtagactgtgaattatttcaggcaaatgactcaatcttttctgtagtcttggtgtctgacatatagggaggggcacaaatgtgtattgaatgaatgaattgataaacccgtttagactctttcactctatacattgtgtaaagttctgttaatgttttgaaaacttgcagatattgtgaactgggttttatgcccatggaaaaatttgcattatatttgaaataaagttgctagaaacgtcaagtattttactataaaggctgttattctttcctcatgtcctcctggtctgagaaatcacatcagaaagtgtttcctgttgctttgtgggaaatgtgtttagcaaggaggacctagagctgacatcctccttgaacgagaactaatactcaatagtaacaatgctctattcactcttatgtttgataaggaaaacaagaagtctcttaatattaggacttcaatgtaatcactattttatacaatcttaattaaaaaaggaagtattttattgtaagaaatgataatgtgtgctaaaaaaaattgacagtagaggccgggcatggtggggctcacaagtgtaatcccagcactttcggaggctgtggcgggtggatcacctgaggtcaggaattcaagaccagcctggtcaacatggtgaaaccccgtctgtactaaaaaaaaaaaaaaaataagacaaggtgggggagaaatcccaaattttgctactcagaagtaactcaaacatttcgatgaataaacttctaaacgtctatatatattcatatgataccaacacttgtttttttttttgagacagagtctcagtctgtcgcccaggctggagtacagtagagtggtctcggctcactgcaacctctgccgccctggttcaagcagttctcttgcttcagcctcccgagcagctgggattacaggcacctgccactgcatctggctaattttgtatttttagtagagacagggtttcaccatcttggccaggctggtcttgaattcctgacctcgtgatccacccgcctcggcctcccaaagtgctgggattacaggcatgagccactgcgcccggcccccacgttatgtgttgtatgtgggatcatgtttctgttttttttttttttttttttcagcaacagtattatgaacatctttccatgtcaatacatggagatatgtgtcataattttgaatggctgcataatattccattttatatacataccctaatttttaaaatctatattcagaatgatggacatttaggttgcgttcatcactgaaacatcctccattaattcttttttctttttattttttactctagcctcccaatgtgctgggattataggcttgagctaccacacctgattggaaactcattaattctccttgtggatatttttacatatgtatttgaatgtctccttgaagtaaatccttagaaatgggatttctgggttagagagaaagcttattttaaacaattccatatcttactgctttccagaaaaattgcattcattttctagtttccccaattagtgcataagaatggccattttctcatacctttccaagcactgggttttgtccatttaaaaatttttgccaaggaaaaaaaatcagttttgttctttttacgtttcttgtttattagtgagattatgtatcttttcatatttttattggcctgacaaatattttggtgttttggctgtagctcatggttgacagctcagagagagaaagatctgagggaagatggatgcaaaagctcgaaattgtttgcttcaacatagagaagctctggaaaaggacatcaagacatcctacatcatggatcacatgattagtgatggatttttaacaatatcagaagaggaaaaagtaagaaatgaggtaaagctctctgaagcagtccacacttccttaaaaatttttagaatttcagaacttgtactggtctccactactttatgttgcatacatattcattgttgtatactaaactacttaattttttttagcccactcaacagcaaagagcagctatgctgattaaaatgatacttaaaaaagataatgattcctacgtatcattctacaatgctctactacatgaaggatataaagatcttgctgcccttctccatgatggcattcctgttgtctcttcttccagtggtaaagattcagttagtggaataacttcgtatggtttgtatccattataccttctatcactttgctatcaaaattgctttgggtttgtcttattgtagatgtaatcttttgaagagagtgtgaccagttcactgaaaactgcatgttaaaaaaattgtagtgatgttttcaatttaaatattttttatttgcatccacattaactctcaacttttcttcttgcccagtgaactgtactgctgagataataatatgtctaccctaatttttagagacaataagacaatttataggcccttgtttattttccagttctatgtgtttatagagtttataggaaaaaataagaatctttagaaatatatgttcttgaaaggtattccataaatgttcttccttttacacttgccttcccagtcttcaatatgagagggaatgaaaagtcaggaaataattgggtgagtaaagcagatatagatagaaacttccattttctttagtcatcttgaaggatatatgtttgtctttgctctctgttgtctgagaaatcagaaaattgaagttaatatgctagccacattttcttaacttctcttggaaattttcaggctaagcctcagctttgctctttgttttttatggtattacttcagtaattattccaaagttctattcattcatgcttgttttgttttggattttagtaaggacagtcctgtgtgaaggtggagtaccacagaggccagttgtttttgtcacaaggaagaagctggtgaatgcaattcagcagaagctctccaaattgaaaggtgaaccaggatgggtcaccatacatggaatggcaggctgtgggaagtctgtattagctgcagaagctgttagagatcattcccttttagaaggtaagtgtcttagtccatttcatagtctagtaaggtagatagacatgtaaaaatattatgatatatcaatacgtgataaattgaatggtagaaacaagtataaggtacagagttagaacaaaggaaggatatgttaactctctgaagggaggggatggataggacaagcttcctgaatgagatgacatcttagcaggagtttggagaaagaataaaagttagctaggcagtgaaggtagggatgggagactagggaaggtgggaaaggtagtgggtggttactggggtggggaagggcatactgggtagaagagggtttaagaaatgttggcaggtataccactgaccttagcgatcctggtaggttctcagggtattcatcaggaatagttgtatagctccatcagttctaggctgcccccattcatcagtgtgttctcattcatcagtgtgttctctctgtatgacacttctaggggaattcaaagacagttcccaacttctagtagttaataattttttttttagtaggccaggcacggtggctcatgcttgtaatcccagctgaggcgtggatcacctgaggtcaggagttcaagaccagcctgggcaacatggtgaaatcccgtctctaccaaaaatacaaaaaaaatcagctgggtgtggtggtgagcacctgtaatcccagctactcgggaggctgaggcaggagaatcacttgaacctaggaggcggaggttgcagtgagctgagatcgcaccactgcactccagcctggtcaacaagagcaagactccatctcaaaaaaaagttttttgtttttttttttttgatatgtatgtataacatgatctacggttaagacagtttagacagaatgattggaataagtagtaagcctctaagagacttagaaatatggaggctagggtatatctatgtgtacacatggcctcagtttaatttcatagcctttgtaagtggtatagactatactcttgtcagaagtatgcctgattcctaacccttggtttttcccctctatcattacagagaagtttcctgagacttagctcctttcaagtctcagagccaaggatttttttaagcccctactgcaaagttgatcactaaggatatttcaggataaatttagcttaagttcctttagtgtgaaggaatgagttttcctttcaatattatgaactttctttgtgtatttataatattccaatttataggtttaaaagaacactccctctccccatttaaattgctctacattattgtgatgaattttcaattctagggattaaaattgactaacaatctatggaattaaatattcaggagtcatattgtataaattgttatcttggaacaggttttaactactttgttttgagaaaatcctagagatactggcaactgtacatgtgagcttaattcatattcctcgtacttttgtgggatctcaagttcagaggactgagttattcatattccttagttcacggcttattatagtagatctgtactaggctgagcttttcactgtatttatttatttccatttcaaaatttcctattcttatttcctttcccctctccatggacaatcctaatgtatttaatgtatgttctttgtaaatgtctgtgtaaagtgtgtactcttgtaaaatatgtatgttgttggtatgcaggtattttaaatttgcatagatgttatggtattattctgttttttatctcccatgacacaatgtttttaagatttatccttgttgctatgtatacatgttatttgttacacctgattgccaccaacccattttactgctcattaccctaagtaaatggatatgtagattgtatccaactctctgctgctgcagcaaagctgggttgaacttctatgtgagtaagaatttcttgggtatttgtagctaggagcaaaattagtaattatttatttatttttgtttttttttaaagagacagagtgtcaccctgttgcccaggctgagtgcagtggccatatcatagctcactgcagcctcaaacttttaggctcaagtgatcctcccaccttagcctcctgaggagctgggtgcacacgccaccatgcctggctaattatttatttatgaaacagggtcttgctttgtcacccaggctggagtgcagtggcacaatcttggctccctgcaacctctgccttctgggctcaagtgatcttcccacctcagcctccggagtagctgggaccacaggtgcatgctgacacacccagctaatttttgtattttttgtagagttggggttttgtcatgttaccgaggttggtctcgaactcctgagctcaagcaattcacccaccttggcctcccaaagtgctggaattgcaggtgtaagccaccatgcttggtgtgtttttaaacatttttttgtagagacaggtttttgctatcttgtccaggctggtctcaaactcctgggctcaagtgatgctcccgccttggcctcccaaagtgctggggttacagatgaaagtcaccatgtccagccaaaattactaaatgataggatatacaaataccaaatttgattcccctccagtctgtacatttcccccagatgagtatggggactccgataattctacttgtgcagtgacggttggtatgatccagctttgtaatttttgccaggcaaacttctataaagttgtgtcttttactttgcatttctctggtaactcaagtttgaacatttcttcataagcttgttgttagccttttgggtttctttttttatggattttgtttatattatttgtctattttccattggggtttccaatttttttttctttttgctttttaggagtttcttatatattctagacattaaactttgttggttttagacttttattttattttattttattttttttgagacggagtttcgctcttgttgcccaggctggagtgccatggcgcgatcttggctcaccacaatctctgcttcccaggttcaagcgattgtcctgcctcagccttctgagtagctgggattacaggcacccaccaccacgcctggctaattttgtatttttagtagagacggggtttctccatgttggtcaggctggtctcgaactcccgacctcaggtgatccccctgcctcgcctcccaaagtgctggtattacaggcgtgagccactgtgctcagctggttttagacttttaaataccttattttaatttgccatctgattaatttttttcctgggtgttctcagtagacgagaactctgatgtagtcaaactaatcagtttttttttttgtcttctaacttgtgtttcctgagttttgttcaagtagtcctattacagtcttattattcatatttagttctttattctctggagtctgcctttgtatgtccactaattcaagaataggtgctttcccaaagataaattttaatctctggagttcacttccattctcaaatacaggaacattggatttttgacatttaattgtattgcaaaaccttttcttttaaaagtacagataatataagagatctaaatttgattaaaattgtggttcctatggaaatgttttctttgggtggtgattggcataaattaaagaatattaagttgttaacttttagctgggtgtggtggctcgtgcctgtaatcccagcactctgggaggccgaggtggacagatcatttgaggtcaggagtttgagaccagcctggccaacatggtgaaaccccgtctctactaaaaatacaaaaatttgctgggcgtggtggcgcatgcctgtaatcccagctacccaggtggctgaggcataagaatcgcttgaacatgggaggcagaggttgcagcgagccaagattgcaccactgctctccatcctgggtgacagagtgagatgccgtctcaaaaaaaaaaaaaaaaaaaaaaaaaaaaaaaaaaaatatatatatatatatatatatatatatatatagtttttaactatttatgtctatacagttttaagtaacccagttgtcttttgaaatttcaatgctttaattttttcttatttgtagggaaatagtaaagaattgacgtatctttaaatacagtagtgacattttacattactgtattcgtatgttggtttttaatcatggatgctttcttcataggctgtgttcctatttgtttctgtcctttccaagatttctttgtgttattagattattaattgctaccaggataagcctcctgtgaaagtagtgtggagttttccctgaataaaggcaacttttctctgaattagtttctctgagtgaattgtaaatacagcctcctcatgcaaagctaaattgctccctcttgtgcccatagtcaagatgtttagattctttctgaaatgtggaattaatggttcagtttttaactaaatgttatattgtgatggttagagatttacatatcagatggtcatttggtctgtttgcctttttaaagctggtagtgttttctcttttcttgcatgtatttaaatgccctaaatttttagttatacatttagggaaaaaggcctttgaccctaggtaataggtacataaattaaaatatgaaagaatttactaggtagccatatcaggatgctttctttacctttaatcttgggatgatttttacaaattttattttattttattttattttgagacagagccccattctgatgcccaggctggggtgcaatgatctcagctcactgcaacctctgcctcttgacagtccccctgcctcagcctcccaagtagctgggactacaggtgtgtgccaccacacccggctaatttttgtatttttagtagagatggggtttcaccatgttggccaggttggtttcgaacacctgacccaagtgatcccctcgcctcggcctcccaaagttctgggattacaggtgtgagctgctgtgcctggccgatttttacaaattttaggtagtacaaatttaaaaaaatggaaacttaaggcaacagatagtttatttgtctgtttttgtttgtttaaatatttttaaagtagtattttctttttttttttttttttttaatttatttttttattgataattcttgggtgtttctcacagagggggatttggcagggtcatgggacaatagtggagggaaggtcagcagataaacaagtgaacaaaggtctctggttttcctaggcagaggaccctgcggccttccgcagtgtttgtgtccctgattacttgagatcagggattggtgatgactcttaacgagcatgctgccttcaagcatctgtttaacaaagcacatcttgcaccgcccttaatccatttaaccctgagtggacacagcacatgtttcagagagcacagggttgggggtaaggtcacagatcaacaggatcccaaggcagaagaatttttcttagtgcagaacaaaatgaaaagtctcccatgtctacttctttctacacagacacggcaaccatccgatttctcaatcttttccccacctttcccgcctttctattccataaagccgccattgtcatcctggcccgttctcaatgagctgttgggcacacctcccagacggggtggtggccgggcagaggggctcctcacttcccagtaggggcggccgggcagaggcgcccctcacctcccggacggggcggccggccgggcagggggctgacccccccacctccctcccggacggggcggctggccgggcagaggggctcctcacttcccagtaggggcggccgtagtattttcatttaaaaagaaaaagaaataaaagttctccttacttgttcctttttgctttctcctaaattcttaatctttttatttttatttttgagacagagtctcactttgtcacctaggctggagtgcagtggcatgatcctggctcactgcagcctcaactttccaggctcaggtcatcctcccacctcagcctcctgagtagctgggccacaggcgcacagcacgttgcctggccaaaatttttcttttttttttttttgagacagagtctcactctgtcgcccaggttggagtgcagtggcgcggtctcggctcactgcaagctcggcctcccgggttcacaccattctcctgccccagcctcccgagtagctgggattacaggcacctgccaccacacccagctaattttttgtatttttagtagaaacggggtttcaccgtgttagccaggatggtttcgatctcctgaccttgtgatccgcccacctcggcctcccaaagtgctgggattacaggcatgagccaccgcgcccggccttgcctggctaattttttgtatttttttagggacgtggtttcaccatgttgctcaggctggtctcgaaattctgggctcaagcagtctgtctaccttggcctcccaaagtgctgggagccaccgtgccaggctctaaattctaaatcttatcctagagataatcttggttaacaattcggagtaaatttttccaaactttattctctgcaattataaatatatacacatacagaacacagctttaagtttaagtgaagtctcaaggacttgctgtttcataactgcaaacttacactgaaggaggcctgaggggacctcaggaaactttaggagtaagcagtagggcttgtctaccttcttctaagacattggcactgataatcaaaccaggcttcacagccctgtctctacctcagttactgtagagttctctgtctccagttgtttgttatattttagactttcatgcagtcactattcagtacattgccaaattctgatctaagtcttcttctgtcattcctatgtgtttctgccataccctgtagaactcctctgtgagcaggaaactctcttgtatcatcaacttcttagaatattcgccgtcttgccttatctgaaactgggcagtttcctgagtttactaccttctccataaccttcttaagtgacatggcaacttttttcctttatatcctacatactttagcaccaggaaatgggtgggcgttgttcttgctctctgttgtctcatccagaccattaatactcccttctccagctgaatgctttgaggttcatgtctctaacctttcctattgatgtaatcaccgtctcattcattgacgattggagttcgtagattataaccttcctcttatgctctttgtctgttagcactcttagtgattttgatacctgtgtggatgagtcatccaaaaccttaacctcttacctccttaacctctttgtctcctgtgaacatttcttaactcttccctgattacaggctagaccctgatctttgtcattactagaactacagcacttttgaaatcttgatgttgagcattctcttctactctttacccacctccacccattttattcaagtttaatgctatagacttaccaagacttctcatccattgattccagaatatcctctctattcatactatcagtcctctcctagacttcagccatcattgtccatcattttattgtccatcattcagttgcttcttagcacatactcttgactctttagtcctctccttatctggagtgaaaaccgatttttttctctatgctgggaagtggaataggtatttgctcctcaaggcttcatccagaccattgcttacgtcctcttttctgggactgatcctttccttgaccttgtgcaggttcaaagactccatgtcacttcaagttataaaaagtctaattttcataattaatatgtcaagtcctattcagtactccaaacttcatttacatataaggttcagttgggcctgcctgaaactttggaagcctgcaatgggatagtaggttaaggtgggttgtttccagctttttcctgttgcaaacaatgctgcagtgaatattcttgtggatgcagaatagtgtagaagttgaacattgatactttaagtttgaatctcaactctgcttcattagctgtgtaactttgggcaaattactcaacttttctattcttcagtttcctcattttcaaaatgaagataatagtgtctgcttgatagtgtgctataggattaaatgaatgaacatacagagaactcttagaatagtgcccaataaatatctgatgtaaatagatctttgtgcatatatacaagtatctcttttgggtgattaggtttttaaagtagtgatttatatttgtatttaattatttgtgaataccagtaaataaattgccctttggtgtaatttaattcatttatctttgagtctgttttttgctttttttggtatgtttaagatcacataaatctttatgattgatgctactggaatgatctaatgctactgtttaccatattttacacatagggacccctcttttttatatatgtatatttatgtggaggtgattaagtatagtctatgaagacttaagattttggctactgacaatatgtaaataaaaatacatatttcaagatgttttatggctcaattaacaatgatgatgataacagtaataataatcatggccattcctagtgtttactagtttgaagcttaatattggtaagttgctctcagatccataacactaataacctgttttaatcctttatacttaacatagcaatttcacatattttatatcattaatttttcacagcaactctgaaataggtgggctagacagccttatttcagtataatcaatgagactgaggttaaatgatttgataaagattgcttagctagtaagcagtagagccagacttgagtctaacttcctattttaagtctgtataagaaaaccataatgggtgagttatatgttccaggacatcagtagttctcaacgaggggtgatttcacacccccccaggtgacatttgacaatgtttggagacatttttgtttgtcagtactggtgaaggggaatcctattggcatctagtggatagagaccaaaaaggctgttaaacatcctataatgcataggacagtcccttacaacaaagaattgccatcccaaaaagtcagaagtacaaggtttagaaactgtgctgtgcagtgatcactgacaacacaggacaaagatcataaaactttacttggtaagattttcccgataagccacagatttacttcaaacttcagtttcttcacatcttcaacttgtcttagattcaggatataaagcctaccagtatcttgcacgtaaaatttctactctaaatcaagagaagttgaagatgtgatgggattgtaaattggagtaaatctgatgcttaacagtaaaaccatttaaaggagtactcctgttgaaaggccttaagttcattattctttccctcactaggttgtttcccagggggagtgcattgggtttcagttgggaaacaagacaaatctgggcttctgatgaaactgcagaatctttgcacacggttggatcaggatgagagtttttcccagaggcttccacttaatattgaagaggctaaagaccgtctccgcattctgatgcttcgcaaacacccaaggtaccgatggtcaaatttagttggtgtgtcaggtcccatgtcccaataagatgtaactactgacctcttgagaacatcatgcctttttcctgctgttctatagggaggataagagagaaccattgcggccaggtgcagtggctcacgcctgtaatcccagcactttgggaggccgaggctgttggattacctgaggtcaggagttcaagaccagcctgactaacatggtgaaaccccatctctactaaacatacaaaattagccaggtgttggtggctcatgcctgtaatcccagctgctcaggaggctgaggcaggagaatcgcttgaacccgggaggcagaggttgcagtgagccgagatcgtgccattgcactctagcctgggcaataagagtgaaactccatcagaaaaaaaaaaaaaaaaaaaagagagagaaagaaagaaagaaccattgctttcctgcttttctctcttgtatttaaaacgaaaaaaaaaagtggctgccactcggcctaaaattgctttttctctttgcatgctacctaccacatcatctcatatgtaccattgtaggctttcaggaaatgtcttaagtaggtgagttggtgagtggtctttgctagaaagtgcaaacttcttactttgaatccgttatttctaatgggttaacatagaacaacagagaataaatgcaggcaactgataaatgtcaggaaggggccagggacagtggctcatgcctgtagtcccagcactttgggaggccatggtggatagtttgcttgagtccaggagttcgagaccagcatgggcaacatgatgaaaccctgtctttctaaaaaatacaaaaattaatctggtgtggtggtacacacctgtggtcccagctactcaggaggctaaggtgggaggatcacttgagcctatgagattgaggctgcagtgaacccagattgtgccactgtattccagcttgggtggcagaggaagaccctgtttcaattaaaaaaaaaaagtcaggaaggatttttaatggggctcttctgtttgattgtcttagtttctagaaatatacgtgtaactcttctacttccatgtacttcaggagtgagtttgttttgtttgttcaacagttaattaattcagcaaatacttaccattataattatgtgccaggcactgttatcaagtgtttcacagttttcattagccaaaagggagacagcagtttagttgctgcttgtcttaagagtataaccttggattcagtcaacaatttgatttctgtcatcttaacagcctctctttcatttgttcatttaaccaacattgagtgttgtgccaggttctgggccaagtgctgcaagtacaaagataaataaagcattccttgggaatgttatagtatactgagtgagagttaggtagtggctctgcactttttaaaaatgccctaatgcacccaaggatgcagtatactttcatatgtagcagttgctgagtatggcagtgattctcaaattggtaagggtattaatatcagaatatagggtgagaagagtatttttgggaaaagcctactaggtgattctgatgcatattcgttatatttttatggtgcaatctctgctcactgaagctccgcttcctgggttcaagtgattctcctgcctcagcctcctagtagctgggactacaggctccccaccacacgccgggctaattttttgtatttttagtagagatgaggtttcaccgtgttaaccaggatggtcttgatctcctgacctcgtgatctgcccaccttggcctcccaaagtgctgggattacaggcgtgagccactgcgctcggcccctccttctcttgatattgatctgtgtagaggaaataggattgagatcactaacccttccctctttaattgctcagtaacttttccctagttctacttttccttttttgcaaaattaaaattgacttctgttgagtaaaataatgtagccactttcagatgtgtcagactagcttacaaagccaggcatatttttttaatctctcagtctcatttggtttgtgcttttgtaatttttcaacctatgtatgtgcctagagtatttctttatttttatttttatttttatttttttagatggagtttcgctcttgttgcccaggttggagtgcaatggtgcgatatcggttcactgcaacctctgcctcccgggttcaagcgattctctgcctcagcctcttgagtagctgggattacaggcttgtgccacctcgcctggctaatattatattagagacggggtttctccatgttggtcaggctggtctcaaactcccgacctcaggtgatccgcctgccctggcctcccaaagtgctgggattacaggcctagagtatttttttttttgtaatgcacagccatagtgtgtcattcagacaaaaatgttattgtataattatgctatcaggttttagttatattttttcccctcatctgttctagtgagtttagaaaagtttttggagagaacaactgggaactggcatagaggttcttggttactatgaataaacaaattgattaaaaaaaaccacttgtataccaaatgaaaggtaatattcttttagattacaacatatgaaattgctagtttttaggtaaaaaatggtcacatatcatcattattgtatgattcattctaatgctaacctgagctcagttctagtttggttttggtgcttaaagactgagttggaaaatcccattacttggatagtaatggtcgcttttttttttttttttttggcactcagtaagtgatggctgaaccttttatggtaggatctgtaattttaatatgttctgatttagggtttgaggagaaggcagtctctaattttttttttccttatttgaatcagcatattgagaagagtatagcaaagaggaagaatcattttcctagatctagccatctatttgttttaaaaaaaatttaatttggtagattttaaaagacactggtgggattatctttttaaaaggaagcttaagataagtgtcattagtgattaatattttttttttaaattaggtctctcttgatcttggatgatgtttgggactcttgggtgttgaaagcttttgacagtcagtgtcagattcttcttacaaccagagacaagagtgttacagattcagtaatgggtaaggattattcgtttactttttagtacctttatatttaatttaattacatttaaatatgtgacataccaaattacttactttgtcttgtgatttttgtttgcaggtcctaaatatgtagtccctgtggagagttccttaggaaaggaaaaaggacttgaaattttatccctttttgttaatatgaagaaggcagatttgccagaacaagctcatagtattataaaagaatgtaaaggtatggttatttatttgtttatgaggagattatagggagttatataatttcccttttgttaattgagctaatgaatatggtaatttagcacatgaacatccaaaaacttttctgggagatttagtattttaggttctctgatatcttaaatggatacatgatattatggtatttatttattcattaaaataatatttaccatctacccacagtgtgttagagaccacattagtgagagaagtgagacacagatgtgacctctgctgttagagttaaaaatagagtgagaatcagattttaaaacttgtttttgcttgggattttataaaaatagtgttctaatttggtaagtaaaaactggtgtcttaatttgcatttttttttagcgaagttaaactttttacttgtttattgaatacgttttaagaagttatccttgactttaagaaattatccttgactcacttttcttttttgatataagtatttttaatttatttctaaatactcaaaaaatagaaactattagctctttgtcatatttttacaagtattatttcccagtaaaacaattttttaacttaaaatttatatatagaatctcgctgtgttgcccaggctggtcttgaactacttgcctcaaatgatcctcctgccttagcctcctaaagcactgggactacaggcatgagtcaccatgtccagcctgttacccagttttttgtgtaccttttatttgttgtattcttttgacatatagaagcttaaaattttaaacagtcaaatctatcaactcttaaaattatttctttcattattgttatgcttggaaataccttatttttcttctttttctttttttttctcttttgagacaagtctcactctgtcgtccaggctggagtgcagtggcgtgatctcggctcactgcaacttctgcctcccaggttcaagcagttcttctgcctcagcctctcgagtatctgggactacaggcatgttccaccatgcctagctaatttttgtattttcagtagagacggggtttcgccatgttggtcaggctggtctcgaactcctgacctcaggtgattgcccgcctcagcctcccaaagtgctgggattataggcatgagctaccatacctggccaccttatttttcattctgccatcaaatagacacacagttttgtttgtttatttatttatttatttattttatttattttttgagacgagtctcactctgtcgcccaggctggagtgcagtggtgcgacctctgctcactgcaacctctgctgcccaggttcaagtgatcctcctgcctcagccccctagtagctgggattacaggtgcgtgctacctcacccagctaatttttgtagttttagtagagatggggtttcatcatcttggccagggtagtcttgaactcctgacctcgtgatccacctgcctcagccacccaaagtgctgggattacaggcgtgagccaccacacgtggccagttttgttaatttttaaagaaatcttacacttagaaaaaatgcttaatttgtagttattacaaagggtgatgcatgtccattttgaaaatgtgtgaaactaaaaaaaaaatagaaattatccataacctgataattattagcatcatgagagtattgcctccagtcttttagaacaaagatttaaaaagttgagattatgtatatgtggttttggattttgcccttttttttttaaagagccagggtcttgctctgtcacccaggctggagtgcagtaagatcacagctcactgcaggcttgaatgtcttggcttaagcaatcctcctgccccagcctcctgaatagctgggactgcagatacccaccaccacacctgggtaatttttaaatttttttgtagggacagggtctcactatgttgcccaggcaggtctcaaacttctgccctcaagcaatcctcccacctcagcctcctgaagtgctaggactacagacacatgtcgccacacccagctggatcttaccctttttctatatcttgagcattttcccatgttgttaaatatttttttgaaaaaaatttaccagtggcataatattgatatatcttaatttattcaaccacttctgtattattggacattgtttacgttgtttaagattttttcactattctaagtgtgctgtgatgaatatccttaaacttaatcattcttttctttttctttaagacagagtctcacactgttcctcaggctaggatgcagtggtgctgtcatggctcaccgtagcctcaacctcctgggctgaagcaatcctcccacctcagcctcctaagtagccggcactataggcacacaccaccacacctggctgatttttctaatttttatttttagtagagacaaggtctcattatattgcttagactggcgcatatatatatatatatatatatatttttttttttttttgtaatgacatcttagccagatttgatctatgttattttgacttaataaagataatcaggaacttactgaatgaaatctttcttatttctaattttttttgggataaatatctagaagtgaagtcaagagtgataaatacttaaggcttttgataacatgcagcagaaattgtttcttagtaatgtaagtaagtaagtcgattcttattagtgacaaaataggatggtattagcatagtgacttcattttttttttaaaggctctccccttgtagtatctttaattggtgcacttttacgtgattttcccaatcgctgggagtactacctcaaacagcttcagaataagcagtttaagagaataaggaaatcttcgtcttatgattatgaggctctagatgaagccatgtctataagtgttgaaatgctcagagaagacatcaaagattattacacagatctttccatccttcagaaggacgttaaggtgcctacaaaggtaatgggatcaatgatcctcatcattgggtatttattgcatgtaagctttgatatagtactgagcatgttgttacagagaaccttggaaggataagacccaggggactgaggtggtggggtgttgggtgtagaaatccctctgctgttagcttccattaagggctttgtgttgaactcaggagttaacctatttctgtggttctagtgcagctgaagaagcatctgacttctctttctcttttctatcttgaggagtagctgagtttcttcttaagaaatggagacattcttactcagggctttaagataccgtttttttgtgtgtgtgataatacctgtctacagtcctggtcattgtacttttgtggcatattaaatacttacaacaattcctaggtgttatgtattctctgggacatggaaactgaagaagttgaagacatactgcaggagtttgtaaataagtctcttttattctgtgatcggaatggaaagtcgtttcgttattatttacatgatcttcaagtagattttcttacagagaagaattgcagccagcttcaggtacttgcatcttggtttacttttttttttcctttttcctttgaaataattttagatttattgaaaatttacaaaatagtagatagtttctgtgcataagtccttcacctagcttcccctaatattaacattttatataaccatagtacagttgttaaagccagaaaattaacattgatacaatactgttcactaacctacgtgttctttttgtagtccaggccaatttaggatcccgtattgcatatgattgtcttgtttccctacttgtcatttttttccgtctcctcaaatctgtgaaaatttatcagtctttatctttcatggccttgtcacctttgaagagtactggctagtaattttgtacagtatacccaaatttggttttgtgtgatgtttttcctgactagattgaagttatagatatttggcaagaataccaatgatgttgtatctttctcagtggcgtcataggctgagagtacttggtggtttttaaaaaattttttgtagagatagtgttttgccatgttgcccaggctgttcttgaactcctgggctcaagtgatccacctgtcttggcctcccaaagtgctgagattgtaggtatgagccactattcccagactcctggtgttgatatgttttattatgggtgatgttaatgttgataatttgtttaaagtggtatctgccaggtttctgcactgtaaagtcattattttgtggggagattctctgtatatatatatgtatttttttttttttgagacagggtcttactgtgttgcccaggctggcatgcagtggctcactgcaatcttaaactcctgggctcggttggtcctgagtagctaattcccgagtagttgggtctgcaggcatatgccaccacacctgactgattttttttattttttattttttgtaaaaaaattaaatatacggatatctctctatgttgcccaggctagtctcgaagtcctggcctcaagtgatcctcctaccttggcctcccaaagtgctgggattacaggcgtgagccaccgagcccggcctctctgtacattcttaatagctttggaagctgaagttactgtgatgcttaggttataaaattgtttctggcttctgaaacgtttcattgggttgcaggatctacataagaagataatcactcagtttcagagatatcaccagccgcatactctttcaccagatcaggaagactgtatgtattggtacaactttctggcctatcacatggccagtgccaagatgcacaaggtaagatgacccatttaaaaattcttttatctgacttccctttttccatatgtattacaaataagtgctttttttctgttattttttgtcttgaattttgttcatattgctttccatttgattttttttttttttttttttttttgagacagggtctcactttgtttctcaggctggagtgcagtggcacaatctcagctcattacaccctcacctcctgggctcaagtgatcctcccacttcagccccccatgtagctgggactataggcacatgccaccatgcctggctaatatttttgtatttttggtggagatggggtttcactatgttgctcaggctggtctcaaactcctgagcttgacgtgagctcaagtgatccactcgcttcagcctcccaaagtgttaggagtacaggcatgagccaccgcggctggctgaagatttgaatttttatgtagttaaatttaccactgttgttgtcgtcgttgtttggtattttgctttgctgtcctgttcataaacatgtattgttttattagtataattttttattagtaaaaatgggattatagcttgcataattatttttgtttttacctgtagtgattagaaaaggtaccttagtaactagtaaatgaaccacctcagaattaatcctcttcttactagtagctttcctttttgggcagtatggatttgttttgtaagctttgagaggaaatggatagtggaaaagtatattcattgattcaataaatatttattgagtgcttgttatgtatattgctcttcattaagaggataaagcacaggcacaaagtcattgctctcacgagtttatgttctgggaggaggcagacattaaacaaatttattatatttcagtgggtagttaagtgctcagaagaaggacagagcatggaaggggaaagaaagtgatgatagaggggtagaatcatcatgatttgcttatgggtttggtatgcattatacgagaaagagaagaatcaaagatgactccaagaatcaaagatgactcaaaccccagtggaaagaacggagtccatgaactgaaacaggggtctttgggagaacaagctttttcctgcagagaatggggatggttaagaactcattttggatatattaagtctgatatacctattaaggcatctggctggaaatattgaataggcagttagatatatgagtctagaattctggggagaattatagatgaaagatgaaaataaggaattattagcacatagatggtatttgattgaagtcatgactaccaagtagctactaaaaatgtttacatttggaaaaccatatgtactttcagtaaattttctatgctcaggtatgttatttcttggttatgatacatagtaaattgttgtagtttgtttttttatctagcaaaatatatttacatttaatagtgtatattggaatgatggtattccaataaatacttgtgccctaatttacttaaccaaactctagttatcgaacatttaggttttcagtttttttggtccttatgatgtaatgagcattcttgtttatctttgtacctatgttgtttccttggcaaattccgagaagtagaattactgagccaatgcatctttttaaagcttttgacatgtatgatagtgtggcaggattcagtttctctttagccttttttctgactttaaaggtaatggttgattttcattggaaaaacagaaaaaaacgatgaaaaggaaaacagagatcacaaccattactaatgctcttgtgtatagttttctagatcattttgctgcttctataaacatacttgtctcttaaaaccaaatgggatcataatagaaatagtctcatatattgctttttaccatttaattacattgaatggtcatcttttcatgtcatttatatagagtgacatgatttttaaagctgcatattatttcattgtatagctacattatgaatggccagttggttgatggacaattagattgtttaagcatattcatctggttattttcttaggatacttttttataagtggaatttctgggtcaaatagtatgtgcagtttaaattttaatacagattgccagactgctctccagaagggtaccctgttttacatgcctaccaacagtggttgaaagtgttcatttcctctgattctagctaatcacctcctctcctctcctccctcccttcccctcccctcccctcttcctgccctcccctcttcctgccctcccctcttcctgcccttgccctttctttgacaggatctcaccaggatgtcactctgttgcccaggctggagtatagtggcatgatttcagctgaaatcactgcaaccgccacttcctgggctcaggtgatccttccacctcagcctcctgagtagctgggagcacgggtgtgcaccaccacacccggctaatttttgtatgttttgtagagttgaggtttcactgtgttgcccaggctgatcttgacccctgggctcgagtaatccaccctcttcagcctctcaaagtgctgggattacaggtgtgagccactgtgctcagccccagctaatattcttgttactcctttagtcttcagaaatctgatactttaaaaatggtaaatttttcttgttctcctttgattaccggtgagattttggccatctgtgctttttgttttgtgaattgtggctcccatcctttgtttgcttttacctcctttacctattttttctcttgacgtgtttttctttttcttactgttttattagaattttctataaaaaataattttctataaaaataaggattgaagccctgatctatcatatgtgttacaaataagtatttttttaaaacttctttggtcttgagtttaatttatattgctttctactgtattgaagatttgaatttttatgtagttaaatacacttttatatagttaagtgcagtttttctttttgtttgatattttgctttggggtcatgtttacaaagatttccttcactacaagcttacaaaaatatttatttttattttctagtatttttaaatgttttctattttctatttaaatttttaaccaactggagtttatttggagctgaagtatgaggcccattttatgtttctttggaactatggatgtgttctttctcactagcttttgcatcctttaaattctagatatttactgtttctcttagcagtgtgaggttaatgatgttatacctaaaattttttgatctctaacagtgctgctgatactactttttgttttttaaaggaactttgtgctttaatgttttccctggattggattaaagcaaaaacagaacttgtaggccctgctcatctgattcatgaatttgtggaatacagacatatactagatgaaaaggtatatatattaacatgaaaaattagtgctaaaaaggaatctcatttttttttacatttaattctagatttaatgatgggaatgagcagaatagaaggggtgaagataatttccctcctttgatttttggttattctaattaatttgcttcctaccctactgggaaagtaggtaggattgaagtttaaaagctaggaaaataagatgttcagtggtttttttaaaaaaagaatgtattaagaaatgtgtttgataatgagatttttaccctatgtttaaaagtcagaagaggattactatatatttgttacttaatggttggctgttcaattttagttcatataaagaatatttcatttaagcttttaaagtggcaagatcacagaaatggaaaaatgtcagatcgtggctctgattgtgtttctaagagatttcagtttatttgtaggattgtgcagtcagtgagaattttcaggagtttttatctttaaatggacaccttcttggacgacagccatttcctaatattgtacaactgggtctctgtgagccggaaacttcagaagtttatcagcaagctaagctgcaggccaagcaggaggtcgataatggaatgctttacctggaatggatgtaagtaggttaggagagaaaccaaagggagtggtgcgctaactatatcattatttttcaggtggtgaatacgatcactccaggaggatttaactactttcgaaagggctggaacttttaataagcattcttacttattgaaaagttctagagaagtaagcataggagaaaatgattgtattttcaaagaatccatataaatagatgcctgtaaggcatttggacaaattatcctaagtattcagtactaagtgcttgacttactgtaatttagtatagtggtgaggagcatggactttggagccacagaactgggtttgagcctcagttctaaaacctaataattctgtgactttgaacaagttacaggtttttctctcatatgtaaaatggagataacaatcctttgaaataagtgctgtttccatgaagattttatttatttatttatttatttatttttgagacagagtctcactatgttgccaaggctggagtgcagtggtgtgatcttggctcactgcaacctctgcctcccggattcaaacgattctcctgcctcagcctccaaagtagctgggattataggcgcccaccaccatgcctgtctagtttttatatttttaatggagatggggtttcgtcatgttggccaggctggtctcaaactcctgatttcaagtgagctgcatgcctcggcctcccaaagtgctgggactacaggcatgagccaccacgcctggccttctgtgaagatgtaaatgagataatggctgtaaagtaatttgcactttcctttgcacatatagtccttattaaatgaccactgaaccctgattattctgtctcttaaaggagtctcttttgctcttaccttaatcttgtaaggaaaggtataatcttacctttccttataaaaaggaaaggatagctattaataccatctttttaatgcctgttataatgctacataatcaagttattctatttaatcttcaaaacaagtttataaggtaaattttatttttattttattttattttattttttttgagacggcgtttcactcttgtcgcccaggctggagtgcaatggcacgatctccgctcacggcaacctcctcctcctgggttcaagccattctcctgcctcagcctcccgagtagctggaattacaggcatatgccaccacgcctggccgattttgtatttttttttagtagagacagggtttctccatgttggtcaggctggtctcgaactccagacctcaggtgatccacccgcctcagcctcccaaagtgttgggattacaggcgtgagccactgcacccggcctaaattttatttaccttataaaaatgtaagtacctaaaattgacctctgattatacaaatgagaaaattgaggcacagaaagatttggacttggctaagttcatgtgacttgctgaatgggatttaaaccttggatcttgtggctgggcatggtggctcatgcctggaatcccagcaatttgggaggccgaggcgggcggatcacctgaggtcaggagtttgagaccagcctggtcaacatggtgaaacccatctttactaaaaatacaaaaattagctggatgtggtgaattgtttgaacctgggaggcagagactgcagtgagccgagattgtgccactgcactccagcctgggcaacaaagtgaagctctgtctcaaaaaacaaaaaaaaaaaaaacaaaaaaaaaaccttgggtctgcctggctttattttgcatgctctttccatatgtcatgcttcccttacagcttgaaataataaatatgagtggctctcttttcatatgtataatttatatctaaatagaagtccaggttggtatctgtgatctttatggcattaggccctctttccaaataagtcagactactgtaggtgattttcttgattcagtttagttcaagaagcgtttgagtttctgtactgtgctaagcactagcatttgagtttctctactgtgctaagcactgttactagatgtgaggtctttcccctaaggagttcaaaatctcgtagtgaagaaaggagtttaggcaaataattacaatataatgcaatgagtataacaacagaactatgtataagtagagatagaactgataagtatttggcttggaaaaatgaggaattcaagggagggttccatgaaggagagaatggtatctgagagaattaaaattttttttttaagttaaaatgtttaatttttgttggttttatttatttatttattttgagacaggacctcactttgtcatttaggttgagtgcagtggtatgatcactgctcactgtagccttgacctcttgggctcaagcaaccctcctgcttcaacctcctgagtagctgagactacaggcacatattaccatgcctaattttttatttttttgtagagataaggtctcactatgttgcccaagctgatctcaaattcctggacacaattgatcctccttccttgacttcccaaagttcttggattacaggcatgagccaccacacccagcaggttttattttaaataatacattcctgattaagacaaaaaacaatagtaataggatgtaagatgaaaagtcaaagactagccatttccctcctaccttcccactttccagagttgaccattccttaatactttcttgtgaagtggaggtctctctctctctctctctctctgagaagcagccccctaacttactgaagctagattagatctgtctgtattcgagagaactgtttgccccatatcataggatttgtcacactttatagtgattatctgtttacttggttttctctcatactagtccatgtgttctgaagtatagaatagtttggaggttaaaataacataccctggctctagactgcctgggtttgaatcccagctctgctattgattagttgtgtatcataaggggaaagttatttaacttcctttgcctaatggtagtattttatagcattgttgtgaggattaaattagtgtatatatgtatataaacgtatagacatacatatagtacttagaacagcacccagttcatagaaagtgctcaataaatattagttgttattaagaatagcatttagcatttttctggtctgtattcagtataaatttatggaagattgaatgaactcatgtttcagttagtggctgaaatagaatcttaatacttggtctgatcaaagggcataggtttagttcttgttctcttatgaattgttgagtttcttcctgttttctcccattgcatcaactgcatttctccttgtgatgttctctcatagaatggttagctatttatagcttatttttaaattgtgtttgaccagtccatattcaaagaatgctttatttaagtactagaaacttttttggtgtttactatagaaaggtttaggttggtataagcttaaatttaattgagtttctgttttcaatgaaattatttattcactcattcatttgttatttgtctagtacttttgggccatctactatatatcctttattatgaaagtcactttctgagctttgaggaattgagtagatagatcaagcagacataaagaacattttaaaatctaatcctcttaactttgctagaacttatctgttcttctagttgtcatcactctagttcttatattatacagtcgaccctccatatccgtggttctatatccatagattcaaccaacctggattgaaaatattagaaaagaagtagatggttatgtttgtattgaacatgtacagactcttttcttgttattatttcctaaacacgatggtattacaactgtttacatagcatttacattgtactaggtattttgagtaatctatagatgatttagggtatacaggaggatgtggtgggttacatgcaaatcctataccattttatgtaagagacttgagcatccatggattttggtatctgtagtgggtcctagaaccaatccctcatcaatactgaggaacaactgtacttgtttgttttatcacttctactaaagtgtaatactttgtaggcaggatctaaatatgatttacctttgtgttcacttttatcacttgatctgtcttgtgtgtggttaagttttttgaagaatgatagtagtggcacctttatgtgtcgggtgctgtttagaatagataccattacttccatttgacatatgaagaaataaaaacttgttaggttaagtaatttgctcatttacacacctaataagtattagaaatgaggttaggtttgtctgactgccaacccttgatttctaaaataagcacaatactatttgacatatttacttgtactcaaagtgacagggatgtaacgtatatgaaattctgtcactgcactaatagttttttctggtttaagtatacattacattcctttacaccttattatttatttatttatttagaaacagaccctcagtcacccaggctggagtgcagtggtatgatcttggctcactgcaacctccacctccagggttcaagcgattctcatgcctcagcctcccgagtagctaggattacaggtgtgtgccaccatgcctgctaatttttgtatttttagtagagatggggtttcaccatgttggccaagctcatctcgaactcctgacctcaagtgatctgcccgcctcgtcctcccaaagtcctgggattacaggtgtgaaccaccatgcctggcccctttatactttagatactatgagcagtaatataatatctatactggtggaatagttgatattcattagattgagatacaaagaatatgatgttgctttatctttttggtatgtctgaataattgtagtttgagagaagcagttttttttttttttgaaatggagtcttgctctgtcgcccaggctggagtgcagtggcgcgatcttggctcactgcaacctccatctcccaggttcaagcgattctcctgcctcagcctcccaagtagctgggattacaggcacgtgccaccacacccagctaatttttatctttagtagagacggtgtttcgccatgttggccaggctggtcttgaactcctgacctcaggtgatccacccaccttggcctcccaaagtgctaggattacaggcatgagccactgcgcctggctgagaagagcagctttaaagtacatcataataatggtgggtgtttccttcagttaggaaatgagcattttgctatgatttttattttaaaaaagagatggagaatttttgaaggtatccttatataatgatttatctgcacatgtatcattattaatgtatcaaaggaaaatggaaagtgacatgttgattaactagatttgattaatttgattaattagatttcttccaactcagtgacatttgtaacacgtgacaggttgcttgataaagggtaacatttctcttacaaatgctacttttgttattttttttcttttggtgatctgtgctgtcatttgcatgttagtaatctgattttaagaattttgtattttggggaacataaccatgttaaaagacagtttattttagtactgaaagaaaatagttacttttactctcatttatttaatttctgttcattttttccctgtatttagaaacaaaaaaaacatcacgaatctttcccgcttagttgtccgcccccacacagatgctgtttaccatgcctgcttttctgaggatggtcagagaatagcttcttgtggagctgataaaaccttacaggtaaaacacatctcttgagaaaaatgcaaagaggcatgtatccagttttgtgcagatcagaatatgtttaaatcctaaaattcaagaaaattgcaacttagaaataacagaggaatccagctctcttgaacattttattaaaggtttctctagagatttaaaagatacagttacatgttttcctaattctaaacttacaggtggtaaggaagtgccctttaccctgccagtcagttcccagccatccatttgtcagctaagggtagtgaggaaataattgttagaagacgtagggcttcatagcacagggaatagggctgtgattaaaaaacagtgattaggaaaatacctattttatcaaagtcttaggcataggtttttttcttgtaaataggaactggactagactatttcctaagttgttttaaagaatttcctttaagattccctttgttttcagaaaatattaatgagtacttttctttatgtttgtgttctgccttttgattttgcagagaacatgatgaaattagttaaaacttgtatttaggatacttttagtctttgcaagattatgactccatagcttatgtctatatgtgtactttattactaattttattaatcttggcttttgagttccagagagaatgcatattaaatgaaatgttttatttgattgttaagaatttgccaaaatagtctcaagagctgaagctgtgctctgacacttctttttgatggcagcggcgggctgcctggagtggctgctgccatcatgctggctgcagcagggaggcgcagctggggctgcatgctctgtggagctggcggtagctggggacaagcaggaaccctaccccttctgaattggggcaggagctcctggttcctgctgtagccgcccaagccacagctgtggacctgggaacccgctccatggagcaggccagagccctgccctcctgggtgtagctgtagccgcccaaaccacagctgcaggctcgggcctccggctccacagagcaggcaggaccccttccccctggtgcagctgtagctgcccaagcggtggctgcagactcaggcatccctgtactcttgggggacctggaaggaccccctgcccttgtaggcttggaagtgcctgctcccgctgcctgacttctccctactgttggcacccactctgatcttagagcaaagctggggctgagcctgggtgctgttgcagcccggccagatgtgcacatgcttggggcagtgctgacatgccagccccctgccgcctcggccccctccggactttgggtgctgatgagcataggagggaagccaagggggtgctgagggcagtttgatactggcctgcaggctccccttggcacctacagcctgggtgccattcatggcagcaggaggcagacaggttcctgggtggaagggggcgggtcaccaatgaggccccaccttcaggccacaaagggcctgaagactgggggctgggctgctggtgtggactgaatggactggagtgggaacttatagtgccttttccaggcttgcccatgtctgcccatggaccagttggcatgtacttcctcccttctgaagcccataaaagcctcgggcttagccagtgctgagcagacactgggacaaccagctgcagagaggagcaacccactctagtgccccctctttgctgagagctgtgcagatgacaggaggaccagctgcagagaggagctaccctctctgctgatagctgaacacttgtcaggaggacttgcctagcagagaggagctaccctctcctgagctgtggaaaggagctgccccccgcaggtttattgagctattttatcgctcaataaagctcctgtttgtcttgctcaccttccacctgtcagcgtaccacattcttcctggttgtaggacaagaacttgggatcccactgaatggtgaggctaaaagagctgtaacacaaacagggctgagacatgccccttgcttgccgcattgcaagtgaagataagtaaagaaaagctgcggcccttcggggagcccagacttgggagctccccaagctagggctgtgactccctctttggggccccgcggttcctggcatctccaagcttctgggcaccaccgtgttccccggtgccagcgtgtaagctgcttgtggtgtgcctggtccagccacagcctcacagagagccagagcccatgctggcacctggagctgcctgccccgctgcagcagtcagcacgtctgtgcgcagtggctggaccccacgctcactcacacacgcctcgctgttccacgcctgactcgcccttggcaggcttgggacccaggctggtagtgtgagctgaatgcagcctgtcaggccaagtgggtgaaacaagaccagtgggcccaagcaaaacttgggcaaaggcgccaccggccacagaagtttctggccagaaaatcaacaccccaaagatcctgtaacattttcattgatatttacaaacatgtaacagtgaatagttctctagttatgtgaaggcatacacattctgacagaaattctgattttgggagtagctttgccaaggttcctttctgttttgcaaaatgacaatgattaaactcacttaaagatttttattgaatgatgaccagtagttaagcagtttattataaaaaatattttattgttacttgtgcaggtgttcaaagctgaaacaggagagaaacttctagaaatcaaggctcatgaggatgaagtgctttgttgtgcattctctacagatgacagatttatagcaacctgctcagtggataaaaaagtgaaggtaggaaaatcttttcctcttgagttgtaatcacaacagaattcattttatttttccatgatcatgagaccagagtaagtagagttaaaggactctcacctgttgatctactaacctgattcattgtaaattaacactatctgaaaattctttacttttttttaaagagacaggattttgctctgtgacccaggctggagggcagtggcatgatcatagctcactgtaaactccaattcctgggctcaagtgatcctcctgccacagccttccaaagtgttaggattataggtatgagccactgtgcgtggcctgaaaattctttatttttaaacaccagcaaaaatgcctaggttgatcacctcaggattaaacaagcagtggggaaaagcaatgacaaattagtgagtttgtcttccattaatagacaagtccatgggttaaatatcagttgaaatctttgagtgcattgtgattaggagtgttgctgcacaaacttggggattcctgttgtaagatacaattttaaaatgcaaccccaatttttttaatttgcttatgaactggcttatatattcagtggaaaaccaggtggatgaacaaactaataattacgttactggtctaaaaacataaatagagaaaagtaaacagagtaatttttacttatttattttgaggcagagtcttgctctgacacccagactggagtgcagtggtacaatctcggctcactgcaatctctgcctccaggattcaattgattcttatgcctcagcctcttgagtagctgagatcacaggtgtgcaccaccatgcccagctaatttttgtagttttggtagagacagagttttgccatgttggtcaggctggtattgaacttctggcctcaagtgatccgcctgcctttgactcccaaagtgctgagattataggcatgagccactgtgccccgccagagagtaatttttatttttgttaagtattctcttgttcctaaatttggcttctaccaggagcatttatactaatatagaattcaagagaaactgaaggcttgtgggggttatcactgatatatggaagacagaccttactttaaccctttttcaaaggggttaaatctggagtactggatgtagctaggtggagtgggcaagaaatttgccttgggtgttttcctgaagttttcacctactggaagagggctatggaatgtccagactaaatttgagaccttggaaaaatctacctcttgatagattggactcgtggcttaaccaacagttaattcactctgtagtgtctactctgactctgagtcagacttggaggtggccactgagggcagttctaaagtcagagctacatggagtaaaaggaaataataatgagtttctgttttctaagccagaggtagaaatacctattaaagaactttaaaataagataaactctctggacctctggggattctaatcagtgctttgataacatacaaaggaaatgccaaaggacattagtacctctaaaaagtcaaaatcccagtgaaggttcattaggtaatttatttcttttgtttgttgttatatggcatagactgcttagttgtcttacatagtaactagaatgatgattaatttttttgtttttttttttttttttttgagacggagtctcgctctttcgcccaggttgaactgcagtggcgctatctcggctcactgcaagctccgactcccgggttcatgccattctcctgcctcagcctcccgagtagctgggactacaggcggccgccaccgcgcctggctaattttttgtatttttagtagagacggggtttcaccatgttagccaggatggtgttgatctcctgacctcgtgatctgcccgcctcggcctcccaaagtgctgggattacaggcgtgagccaccgcgcccggcctgatgattactttttactgaaaactgaacactataagaggctataaatactacacactttgtcatattacattatcaatttcctgctacagcttgcagggttaagtgtcgatcccgtttacagaagaggacgcagattcagagatgaagtctcttgctcaagcttacattaaactgggaacagtaatagggttgaaagctgggtttctctcagactataaaacctttattttttttaactaagcaatctgcctttacttatttatatggtaccttgaagtccatagaacacttgtcatgttcattatctcatttgatatcttaaattgtgtgggagaggtatagatatccccattttacagaagagggaactgagatgcaggtaagttagggatttgtgacacacaagtcataagtggtagagccagctcttgggctcaacccttctgaccagaaatctattatgctaacctctttaaagcacttctctgcctgctttcattcatataaacatgtgaaatcttgcccttaagaaatgtcatgtgttcatgacactctagttatgctataggtacatatatgtatatttgcaaataattttttttaaacattaaggcaaaatattgccatattttagaaaggggagaggtttcattagcatcttgtccaactaggaaaatctgctatgacaggataagatagcatttgcaaagcaatggacattgctttgcccctctgttctccctttgaaaataatggatatttgtaaattttttctcttttctctttagatttggaattctatgactggggaactagtacacacctatgatgagcactcagagcaagtcaattgctgccatttcaccaacagtagtcatcatcttctcttagccactgggtcaagtgactgcttcctcaaagtaagtgtggatattgagaattaggtagataaatttgattcgtacatcagagtatctcctttgattttcttatgtatactactattaggactttctggtcacaatgatagaaactacaataatatattagctgaagcaaaaaaaaaatagcttaaaaatattttattggctcatgtaactgaaaagtctagagggagcatggcttcaggcatagctgactccaaatgcttaaactgtgttctcaggctctacctccctttccatctccagagtcttgacttcctctgtgttggttcaggcatgctctttctgtggcagaaaatgtggctaccttacagctcacaatcacagagtaagagaaatgtgctctctcctagaacccatagatctaattttagagaagcctttatttgactcattttggcttacatgctcatagctagggtaaccccagtggacagtaggatggaatccttggattgtccaagggtcacaagtttagttatatggaagtgggacaaatgagtgaggtcaactctacttgaatcgtaagtagagcttaattcaaaagagagttctgttatcacagagaggagggagaaaaggtgctggtaggaaagataaccaaaaacagaaattcattccacatatgctttgtaatgtttgattgtatctttttttcctcttaagtggataaagatagctagattaccttttctggaatcccagaaagatctgctaactttttttgaattgttttttggtttgatttcaaacctttcttccttgataccataccatctttgcaattgaacatgatatttttgagaggggtagtaaaagacatttcagtttggaaaacttcatagactctatgttttgacatttaaataaattattagaaaaattatctttagaaagtactgaaacagttattgaaaattgccgtctccatccccctgttcaggaagctaaatttttatttatttatttattttttcagaagaaaaaattatacagaagctcagtgtgtataagagttaaagcttgctgctctggctgaatgggacctacatttcttcttgactctctcttcctccccctttccctctcctctctctctctccctctatccctttcccttcctgtcaccttcccttcctcttgaccttcctttctctcctcctccctctcttcttctgtctcctcctcctcctccctcctcctccccccaccccccctctcattctctctcattccctttcatctctaacctctccgcaccacatagtgctctttaggcatatttatgtttatagaatcccaaggaccctgcagagcacaatttgaaaacactggattggaccaaaattacagagtaatgtagtaacataaaattatatcacagttatggttcacttttactcaaaaaaacttggccctatttgaataaatgtaccactaaaaaaaaataagactgttatactatttacgactaatttttgatgttgcttttggcattttgtaggttgaggaaataaatacaggaaaaaacctctgccatgtgggagggggttattggttagtaagccattttaattaaggacaaggtttactttaagatgtgctatactacctatattaccataaggactattaggatgcatttcttgtgattcttgagcagagagaagccagtgaaaatatgtaattgtgaagctgccttcatgtaacttgctttatctgaagaattgagtttatctaggactgggataaaggagtcaaagatagaagtggacatgaggaacagtatatatctcacttactaatcatttctaaataatttttgccaaaactaacatttagcaataattgatttcttcttctgggtttaatcttattagcataaatcaccagagatgactataatcccttttatttgcattttttatactttccaaacctacccaaagagaggagatataatataaacccctgtggtatccatcatttagtttcaacaattatcagtattttgtcaatcttattttataaatacccctcccttttttttttttttgagatggcatcttgctctgtcgccaggctggagtgcagtggcacgatcttggctcactgcaacctctgcctcccgggttcaagcgatttccctgcctcagcctcctgagtagctgggactacaggtgccgtgccaccatgcctggctaattttttgtattttagtagagatgggttttcattatgttggccaggatggtctcaatctcctgatcttgtgatcgcctgcctcagcctcccaaagtgctaggattacaggtgtgagccaccacgcccagcttataaactcctccacttttttgaatagagtcttcctctatcacccaggctggagtgcagtggagcgatcttggctcattgcaacctctgcctcctgggttcaagcaattcttatgcctcagcctcccaagtagctgggattacaggcatgggccaccactcccagctaattttttgtgtttttagtagagatggggttttgctatggtggtcaggctggtcttgaactcctgacctcaggtgatacgcccacctcagcctcccaaagtgctgggattacaggggtgagccgccatgtccagcctgaatagaggattttacagcaagtcctaaatatgtcatttcacccaaaatatttaagcatgcatctcagagatcttaaatataaatactatgtttattatcataccatactattatcacacctaacataataaaatatagttttgtaatatacttggtccatgttcacttattccatattctcaaaacatgcatttctatcatgtttgttggaatcagaatccaaacaaactttatgtagcatttgttctgcctcttaagtctcttttattctattaaagttccctttttcctctgactgctttcttataccattgatttattagagcaatttagtcatttgtcccatggaatgtgccatattttggatttggttaattgcttcctagaggtggtacttgacttgctccaccatttttagggttggataacctgacatttaaaaaatatgggggtaatttatattacatattacttattgtggctttttgtaactgagtaaaataataatgattctaaaccactccgttgaaataagtagtaattgtttagttagttatttagtactcagcctaaaaacctcggtgagcctttgagtcccttagtcgatttacatgctgatctaaaggctgccccattgcttgttaatcacaagttcatttttgtgtttgatacgtttgtgttactgtgaattaaacatcattctgtaatcaaaaagcttaaatgagagaaaaggaagaacttcacatgatttctgatgtttccccactcaatactagttgtttatttatctttttttctttcacaaatagctttgggatttgaatcaaaaagaatgtcgaaataccatgtttggtcatacaaattcagtcaatcactgcagattttcaccagatgataagcttttggctagttgttcagctgatggaaccttaaaggtatgcttttgtacactattaaaataggttgtattttatggaaagtcttatgatttgattatagaaataggtttctgttttttcacatttctacagaaagagcctgcttctttcaatttccaggagcatatttaatgtaactgtaattgcttatcgtaatgattgtttatgaatggtgtacaacctaatgcttaaagttctataatgtaggctgggtgcggtggctcacgcctgtaatcccagcactttgggaggccgaggtgggtggatcacaaggtcaggagttcaagaccagtctggctaagatggtgaaaccccgtctctactaaaaatacaaaaattagctgggtgtggtggtgagtgcctgtaatcccagctacttgggaggctgaggcagagaattgcttgaacccgggaggtggaggttgcagtgagctgagatcacgccactccactccagcctgggcgacagagtgagactccgtctcaaaaaaaaaaaaaaaagttctgtaatgtagaatttttattcttttaatttgaattcttaaattttaagtgtacattttgtttcaagcatatgttcataaaatattttgagatctgttttagtttattttgtgcttctataatttatgttgtgcttctataaattgtgagtaatttataaagaatggagatttatttcttacagttctgggggagagggtaccagcagagaagggagagagtgaggaggcggctgaacttatccatttatcaggaacctaggtaatagcattaatccattcatgagggtagcgccctcatgacctaatcacttttgaaggtcccatctctcaatacttgcatcagggattaagtatttaatacatgaactttgggggacacgtttaaaccacagcaagatctatgggtcaggtttgtaaaggatctggcttttgtttttgtttttgtttttgagacagtctcactctgtcgcccaggctggagtacaatggtgtgatcttggctcactgcagcctctgcctcctgggttcaagcgattctcgtgccccagtctcccaagtagataggagtacaggcgcctgccaccaagcctggctaatttttgtatttttagtagagacggagtttcaccacgttggccagtctggggacctgtttttacttataatttattcattctgccttttatattattgctttcttgtttttgagaagccacaaggtaggaaaaatgcaagagttagggaaaaaagcttattcagccttctgaaatttataggcctaaaaaaatgaaataattcttcctcaaatccccaccttctccaataagattcccaattccactttattattcctgtctctattgtctctcctgtttattgactgtcctttctttctttggtcttaagatcaacccatctttgacattgttgtctcttggtctacatttttccctcttgttctgtagtagttgctctagttcaggctgttgtctgctcatgcctgatagcaaccatctaagatgcattctgcatctcttcttatctaagttcagagatactagaataaccttctaccactgttttctttcttttttttttttttttttggagacagagtctcactctttcactcaggctggagtgcagtggtaccatcatggctcactgcagccttcacttctggtctcaagcagtcctcgtacttcagcctctcaagtaactggaatcacaagcatgtgccatcacacctggcgaaattttttttttttttttttttttagagataggatcttactatgttgcccatgcttgtctccagctcctgggctcaagcaatcccagtgctgggattataggcgtgagccaccaagcctagcctaccactcttttcttttttcttttcttttctttttctttactcttctcttttctttctttctttcttttttttgaaacagggtcttattctgttgtctaggctggagtgcagtggcctgatcctggcccaccacagtctatctcctgggcttagatgatcctcccacctcagcctcttgagtagctgggactgcaagtgcctgctaccatgcccagctaattttttgtacttttattagagatggggttttgcctatgtttcccaggctggtctgaaactcctgggctcgagtagtctgcctgccttggcctcctgaagtgctgagattataggagtgagccactgcatccggccctaccactattttcaacataaattatgccatagtataaactgtaggaaacgcagactcattgggatgacttctaaggttcttcaccttccgtcattctgccacatcctttcctgtcaagtttgtttcttctaacccctataccttaattgtctgttctgggcaaggtgttttatttcagctactgtccctgtatgtgtttcttgggatgtttcctatgtgtgcccctgtagcttttcttaggatgttttttgccttcgatttcacttgccatattttttaatgcccgtcaaaactttaggcaaagccttttgtgtgagggtgagagagagagagagagagagagagagagtgtgtgtgtctgtgtgtgtgtgtgtgtgtgtgagagagagacacagggtcttactttgtcacccaggccggagtgcagtggtctgggctaactaaagtgatcctcctgcctcaaccgcctgagtagctgggacttcaggcgtgtgtgacaatgcctagctaattttgtttaatttttgtagagatggggcctccctgtgttacccaggctggtcttgaactaagctcaagcgatcctcccactttggtctcccaaagtactgggatcacagacatgagccaccacacctggactgcaaagcattcttcagaaagtgttctcttacagcatccatctgtttggttctgagtacatatatctatctatatctataggtagaaactgcttggtttgtcttctgatttccacttataaatgtgttgtactgttcagtcattttaatgtgtcttctgtttctttgattaggttgaatataggtttatgatctgcagggaacttgacatctttttgttgtattatacctttctttgtaactcatagtacagaattgtactcaagtattcagtaaattttcttgactacaccttttctaggaaaatacttaaatactcctgggcactattttgtttgttagaatctctagggaaggagattcagcaatgctactaactcctgagaaaggtaaactgttttgattctgatactctggttgaatctttgatcttgctttgctgacggaagataactgtttttgtataaattactccagagtatctagaaactctttctgggtagaattctactttgtagagtttagctagctgttagtgggtgctgggagcattcttaggtagaatattcaggtaagtggattttggcctctatgctatatctatctgcttcttcctttagaatgatccatgtcatgggaggtttttcagaatacccgtggatggatttaggcagccctcctttcattttgtcagcctattatttcctggtttttactcagtgaaagacttcagaagaaggcattttatattttaagttttcctttcatcttatctcctttgctaattccaaattctgggaagactgcattatccttagcatgtttgccattattattaggttgccaaatgttcaagaaagctgtaaaactaggccatttatgtgttgtacaaatataagttgtacagctcagctgggccttatttgccgctgaattatggtctgttcatccctaatttatttgcttttccactagtgcctattctaatccttttctgctgttcttaagcccctaacccttttattttatggcaataatgttacctcatacccattcaaaggattaaaaccatccaccaagagtcccctatcataagccccctcagaaattgctgtaaaaagcctctgctccattttttctcataacagtgtccaaaaagtcctgtacttgggccagacatggtggctcatgcctgtaatcccagcactttgggaggccgaggtgggcggatcatgaggtcaggagttcgagaccagcctggccaacatggtgaaaccccgtctctactaaaaatacaaaaattagctgggcgtggtggcgcatgcctgtaatcccaactactcaggaggctgaggcaggagaattgcttgaacccgggaggcggaagttgcagtaagctgagattgcgccactgcactcaagcctgggggaagagcgagactccgtcttgaaaaaaaaagaaaaaatcctgtacttgtacctactgttcctccctttccttcttttcctggcaccttgtttcattagttgtttcctctctatgttgcttcttcagatttttcttcttttttgaattattttccacagcttacaaatgttcttgggccttcctgagccttataaagccaaaaagtgaaaaacctttgattcttccttgattgtattgttctttaaaattgtcattctgtttttctctttcccttcatgactgggcttcttaagtcatctatacttgcctctgtttcctgactacctactccctgcttaaccattttttagcctggtttcatcttccctgtattcccttgaagaatgtaaaaatccagttttattttcagtttcaattttttttgtagtctaaggccctctggattagtgtgaaatctgatatttttctttatctgattctcattatttttgttgtattactattggtcaaacccccaatgaccacctagtttttttgtttttttgtgttttttttgaaactctcctcattttacatcaatgttttattctttctcctcttagctctctgatcccttcattaactattttccctgaccattaaaatgtagctattcctgcagcatctaaccttggctaccacctctatcaccgctcttccatcccagttcattcagtctcatggcttcaactcatcttttttcaggtatgtcatctgcaaccttcattttatgagctgtgttcttcattcctaacttcctgctagttgttgtcacttaagtaacataccatgcctcaaagttattgcactccaaactgagttaattattctcttctcaaacatgacctactttttatgtttcattattattttttttagacagagtctcgctctgttgctgaggctggagtgcagtggcgcgatctcggctcactgcaagctccgcctcctgggttcatgccattctcctgcctcagcctccctagtagctgggagtacaggcgcccgctgccatgcccggctaattttttgtatttttgagtagagacggggtttcaccacattagccagaatggtcttgatctcctgacctcgtgatccgcctgcctcggcctcccaaagtgctgggattacaggcgtgagccactgcacccagcctatgtttcatgatttaaaaaaaaaaatttcaacttttatttagattcaggggtacatgtgcaggtttgttatgtgagtatattgcatgatgctgatgccgaggtttgggtacaactggtcctgtcatccagatagcatagtacccaataggtgcctcattcccccctccccaactctagtagtccccagcatttattgttcttatctttatgtctttgtgtacccaatgtttagctctggcttataagtgagaacttgtggtatttggttttctgttcctgcattaatttgcttaggataatggcctccagctgcattcatgttgctggaaaggacatgattttattcttttttatggctgtgttgtatcccatggtgtatatgtaccatatttcctttaaccttccgttgatgggcacctaggttggtttgtgtctttgctgttacgaatagtgctgcagtgaatatacaagtgcatgtgtctttttggtagaatgatttgttttcctttgggtgtatacccagtaatgggattgctgggttgaatggtagttctgttttaagttatttgagaaatctccaaactgctttacaaagtcaccgaacaaatttacattcccaccagcagtgtataagcgttcccttttctctgcagcctccctggcatcttttattttttgactaaaaaaaaaaaacaacacatatataaaaattatatagcagtgttttgtagttctccttgtagagatctttgacttctttggttagatgtattcctgggtattttatttttttgtgtgtggctactgtaaatgggattgtgttcttgatttggctctcagctttaatgttattgatgtacagaaatgctgctgatttttttttttcttaaatagaaaaaaggtcttactacgttggccaggctggtctcaaactcctggcctcaagtgatcctttggcctcagcctcccaaagtgctgggcttacaagcatgaaccactgtgcctggctaactgatttttgtacattgattttgattagaacagtgttcagggtttacatcattgtaactaatcacaattgagccgtatcgtgtgaatttttttcctctctcattagctttctgttttccctggggttgataagtttgttttttcatttgtttagtttttatatgtgcttatcttcaaactctctcttgttaatttgctccttaaatgattcaaacttaccaggcattttataagtcttttcttggaaacaacatttttggaaggttctatcttgctccattctggtcggtaatggtaatactattcccagagtccagctgccatcctgaggtcttccttaccatcatcctagggattccttttgcttttcttttaaattggaacacttgtttttcagttttttttttttttttcgtcttctttcttggcttactttttcagcttggtggagaatctcctctagcttcctaagaaagaatctatgggaagtaaatttttaaggtgtctttattataatgtctaaagatgtctctgtttttcacttgctgatttgcttgagttccttatgaattctggatattagacctttgttggatgcatagtttaacaaggccaacaaaagcaatgcgggagaggactctctattcaataaatggtgctgggataactggctagccatatgcagaagaatgaaactagacctttaccttttaccacatgtaaaaattaaagatggattaaaaatttaaatatatgacctcaagctattaaaatcctagaagaaaacctaggaaatacccttcttgacatcagtcttggcaaataatttttggccaagtcctcaaaagcaattgctacaaaaacaaactttgacaagtggaacctaattaaatgaaagcttctgcacagcaaaagaaactatcaacagagtaaactgcctacagaatggtggcttctttcaatctggaaacttatccttcagttctggcatttccttgaattatttgatttcttcctattttctctttctggaatgcttgtgtttctggattaaaattttttttcctctccttccttctttttgtccatttgccctactttttgaaagatttctttagctttacttttctttccttctattgagttttaaatttctgctaccatatttttaagtattcattcttgtgtgattagttccttttaaatattattctgttcttgtttcatggatgcagtatcttttatctttttatgggcattagtaatagggttttttttgaagttttcatattccagtgtaatagatatttttctatttgttggttttggtttctgtttggattttagacatagatatatcttagctatctgatcctttgctatctgctcatatttaagaatacatcaccaacaagttgaatgggaattgtgaacttttaaattgtggttttcctatgggttatctgtttttatcatgaacaattttttttttttttttttagacagtcttggtgtgttgcccaggctggagtgctgtggcaccatctcggctcactgcaagatggtgaacttttgatgtcaaagtctttatatcttttgtcttgaactggttgggtgtccagagtaaaaattttcttttctcttttttctttttcttgcattttttttccctcccgagatggagtcttgctctgttgcccaggctggagtgcagtggcgtgatctcagctcaccacaacctctgccttttgggttcaagcagttctcctgcctcagcctcccaagtagctgggattacaggcacgcaccaccacacctggctcatttttgtgtttttagtagagacgggatttcaccatgttggccaggctggtcttgaacttctgaccttgtgatccacccttcttggcctcccaaagttctgggattacaggtgtgagccactgcgcccaatgccgcccccccccttttttttttttgagacagggtctcactctgtcacacaggctggagtgctggagtgcagtggtgtgattgcagctcactgcagcctcaacctcctaggctcaagtgatcctcccaccttagcctcctgaggagctgggactacaggtgtgcaccaccatgcctggctagaagaaattttaatctcctatttgtaggatatgactctggccagttctgagatgatatctgggcagagatctcaacatttagaaaaaagactttctcttaattttcctgttttcaggtgacccttctctcaactgtgttgggtatagaatagccttgtattctgccagagtagggacacaggccccctgggttgcagagtgaagggaggagatttcaatggacttttaaagattcctcttgacttagcttcacctttatcagaaggtactgggtgccagcacttcctgagtctttttgaaggacttaacttcacctttatcagaaggtactgggtgccagcacttcctgagtctttttggagttctgtggggtgattgggctgcttggatttctccactgcaggctcagaatttaatttctaggagtctgcctattacttgcctttctgctttctagacttgatgattttgttgctgctgtctctttctccattttccttcgccttgtggattatgccgagagaaaaattcctattactattgtttacctgagttttgggagagtttggaaatggtctgtgtctgttctctgttttctgaaacataatacctgagactgggtaatttataaagaaaaggggtttacttggctcatgattctgatggccggaaattccaggattgggaagctacacctgatgagggccttcggctgcttccactcatggtggaaaggggaggggaagtgggcgtgtgcaaagagatcatatgaaaagagaggattgaagatagcgaaacccaggaagccagactgttttcaacaacccgcactcttgagaactaatccattcccagggaactcaccccagtgggaaggcattagaaggcattcatctgtttatgagggatccacccccatgacccagacacctcctatcaagccctacttcccaacactgccacagtggggatccaatttcaacacgagtttgggtcaggataaataaaccatctccaaaccatagcagagctgtatgtgttctctgcatctttaacacctgaaccctatttctttcagcaacactattgtctgtactcgcctgtgcttgaaacttgggagtgatctttttgtttgtttgtttgtttttagagacggggtttcaccatgttgcccaggctggtcttgaactcctgggctcaagtggtccgcttgcctaagcctcccaaggtgctaggattacagacatgagccactgcaccctgccgggagtaatcagtcttttcacttaaaatgtatttattgaatacttagtgtgtgccagatactgtactaggtatttggattttaaaccctgaaaaagaaaaaagtatacttcctggctgttctgaactgttcagaataaagttggagagaacataagtgaacagatgaaccatgaaaatcataaacgtatgaagacagtgctctgagagcagataaggactctgttggggaagggttcacatacctgatactacaaccagattgaacttgttcttctttttcattgtctttgttttctcattttgtactttagcttatgctgatcccttggaataggctctaggccctggagtgttcccctgtctttttgatgttgaaattctctgtcttaagctggtataagataggctaatctcagggagtagagtgaggtgactacctcctgtacaaagtgttccctcaagccctcagcttgaatatagcctccccactgtgctataccttttcctttcaaatgacacctgacatattttgtgtttaagttatttatgtgcttgtcttacttcccttactggcctgtcaactcattgagggtagtatctgtatctgattcatttatatagtctcaaagtgactagcatagtgtttaataaatgtgttaaagatgataaacccttgctgtgtcacttcaagtcaaactaagacttcttcaaactcggacactttttaaaaagtcatcatttgacagggacaggattttgatttccgtattcatgtatgagtatcaaaatgtgattgtggctcacagagcactcgcagcaggggacagacactactgcactcttggtgagaactgcccatgtttgtggtggctttcccaccgtgctgttaagtcagtatcattggttggttcacactgatataatgacaggtagtaagcagaggtcctgcaaaatgatgttagataacagcatttcaaggtcaaattctcctgtaagtttttaccttttgagaggatgaaaactgtaaaattatgtcctgccccaaatggctctataactttttaagcattttgtagggtatcatgttgataagcatgtgcttttcaggctctgagatgaactgttttaaaatgtgagttctatttaaaaatttgccatttaaagcacgcagaggcctggggtgcacagggaccctggatacagtgtagcgacttgctcagaatgaaatgctggtattagtttatgtggtccctcaatatgtgggatttcaccactgcttggacagaagctgaagtcaggtccagaaacagatgcaatttagacatgtataatcaagttggattgtgctacttttatttttctttgtaaaattcaggcaatagttgctttttctttttgttttttaaaatttttttaaattgaaaacaaaacaaaacaaaacagatgaggtctcactgtgttgcccaggctggtcttgaactcctgggctcaagtgatcctcccaccttggcttcccaaagtgctgggattacaggtgtgaaccactgtacccagcctgattttcatattaatagggaaactgatttctcatatattctggataatgtaactgaaggttcaggcttttatgtttatttatttatttttctctttagtatcagggaaggctgttttagcacctgctgtctcttttgcattacccagattacctgcagttgttgcaagtagaaaagttttggttttggccatgtttcttagtatatataatacttctttttactcgagagatttgaaaatgtacctggccagaaaaattaggttttacctgggagttgtgctttggaagctgacttaaagcctgagcagcagctttctcccccaacccccatccttctccgtggccaacctttggtttgggcatgggcagtcattatcactctgtgaggctgagacactgctcatggcccagaggagtgaaggtggatcttcttgaaggcctttgtcttttgtgctattcaagtggtcctactagtgagcaaagtttacagtattttgtatctcattcctcaggatccagttagttttgtagccctatctggccctgccaagcacacaaagagtcttgcttgtccctgttttcagagacttccttatgtctctggatgctctgctaggtcacgacctaacttggactgggtcctgtgtagtcttcctgctgtgcatgtggtaggttcgtgaaacacacttcattcctggcacagcagagggcagcagtggcaagtcgtgagtctcttcatcttaccacctttcttccacttgtgtccttactgtcaacatgtaatttttagcttccacaccatgcaagactcttaactttttatttaattttatgttctgcattttgggcagtgcttctaattttttctttttaagaacgtaataatgaaactggagatcttaatttaaaagccttacaaaaagtcatgcataggtaaaaataattcatcaagtgaagtgaataagtttatgtggcatttaatttaggaaaaattctagaagtgtgattatagagtaaaacaaactttttcttttttattactttaattcaaagctttgggatgcgacatcagcaaatgagaggaaaagcattaatgtgaaacagttcttcctaaatttggaggaccctcaagaggatatggaagtgatagtgaagtgttgttcgtggtctgctgatggtgcaaggataatggtggcagcaaaaaataaaatctttgtaagtactttaaaaagccaacttcagtctgatttaaagaaagttaaaacttctgttcatttttgcattttacaatgtttattcataaaaataaagtctagctgtgtgattttgggcagtcttcctaacctgtcatggttctttggaactgtgctccgtgagataaggatggccttgtaaggaaaggtctccatggttacaccgtttgggaaatatgttttgtattgctttcccctattaggcacactgtatgaactaacatattcagggccccaggaagtcctcttacacaatttatgccatcgaatccagtgttcctcaaatgtatttaaaacatagaatgctttcttcatcactccttttttttcttcaattttgattacattggtttaggtgatttttcaaagtgttttcttacacctacaattttatgatttgatgactctgacagaaatgctcatcaatgactgaacaagatagtgaaatttttataaagtaaatgaggaaaatatgaaaaaagtaaataagaaaattctttgcttttcttccccacatctaatagtagctggtatttgtggtattcagagtgccctcacatataatttcttttgatataagtattcaagaagcagcgggttacagtagccctatgataataatgaggcaactgaggttcagagcagccaaatgatttgtctaaagttacattgtgattaggagaaccagatcttctgatttatggctcacttacattctcatctaatagtgatttcaaaagacttgaatgagggatattactgttttaaagagcataattgaaatataaaatatggttatataagaactcactgagggatcatgtatatgattgttattgatttagtgctacaatccttggatgttggttgcttatgagtttgtacccctttagcaggaaactaagaggaaaaatacctccctttaagtttgttaaaatctataagaacagaaaagaaaccactgcataagcaagacttgaagattaaaacttttttattgtgataaaatgcatataatgtaaaagttgccattttaaccatctaaaaatgtgcatttcaatggcattacattcacaatgctgtgtagccattactactatatatttccaaaactttttcatcaccctaaacagaaactttgtaaccatgaagtaataactcctctttcccctctcttgctagacctttgtaatctctaatgtaatctgcgaatttgcctaggtatttcatataaatggaatcatataatatcggtccttttgtgtctgactcatttcattgagcatgttttcaaggttcattcatgttgtagcatgtatcagaactgtatttcttcttatggctgaataatattccattgtatgtatatatcacattttttctttgtttttttttttcttacaaaccagtgtttattttcacatacagccttgttgtaaccaatgtacagatcaaaactcaaaatattcctcttcagaaaactttgaaccttatcccctagccgacctataatggttgaatttctgtcaagtatatatttatgtatataatgggcttaattatttaagagaataactgagtgatttgtgtgatctgtgaaaaggaattggactatcatacttgggttgtatatcacatttttttcatccattcatctgttgatggacacttggtttgtttccaccttttggctactgtgaataatgctgcagcattggtgtacaagtatctatttgagccttgtgtgtttacctaggagtggaattactgggtcatatggtaattctttatttatttagttttctgaggaaccactagatttttccacagcagctgcaccgttttacattccactagcaatgtacaagggttccaatttctccacatccttgataaaacttgttattgttcatttttaaaattatagccatcctagtaggtgtgaagtggtttctccttgtggtttgatttgtgttttcccaattaccaatgatgttgaacaaaagataatttttgaaaagattttaagagacctgttctagtgagaggaagataattttatattgcatgaaatgccttgttttaaaaatctgtacagcagttccctgttttaccatgctaaaagaaagctacccaaaggtgttccttaactgcatgtagatcccgatttcttaccctttggtctctccttcctcctcctgttctttctttccaattcctatgtgagtctactcctattgttaggtcttttttcttttactattccataattgggacaactgcctattgtggaataggcaagtttgccaagtttcctcgatcactgtcagccactaattttttaaaaaatgacctatcttgggaagcattttaaatctgatttcctgccctgtgtttttggcctccggcgctacgctgcctaccatatgtgcatgcttgcagggactatgcattcactaaacatttttttttttttgagatggagtctcgctctttcgcccaggctggagtgcagtggcgctatctcggttcactgcaagctccgcctcctgggttcacgccattctcctgcctcagcctcccgagtagctgggactacaggcacctgccaccgcgcccggctaattttttgtatttttagtggagacggggtttcaccatgttagccaggatggtctcgatctcctgacctcgtgatccacctgccttggcctcgcaaagtgctgggattacaggcgtgagccaccgtgcctgggctactaaacattttaatagctcccactggaagcttttttgtttctttctaaggtctatgtcttgatcttaaatcagtatattgtatcaatacatgtagtaaataaaaatcatcttatttggcaaaaactttggaagagtatattcagcatttataaatcttaaaaattgaagaaactgcggctgggcgtggtggctcacaccggtaatcccagcactttgggaggccaaggtgggcggatcacctgaggtcaggagttcgagaccagcctgaccaacatggagaaaccccgtctctactaaaaataaaaaaattagctgggcgtggtggtgcatgcctataatcccagctacttgggaggctgaggcaggagaattgcttgaacccaggaggtggaggttgcagtgagctgagatcgccccaagctgagattacgctattgcactccagcctgggcaacaagagcagaagtctgtctcaaaaaaaaaaaaaaaaaattgaagaaacttggattacccaaagtagttttttggggttcaaaaacaggaaaatgattgactataatggagcaatttggtagttctagagagaaataaaaatgactgagctaattttattttagcaaacctctgctctatattattttgatcatcttcatttatgagtattcattttctcttttgaataaacaagcattagggagaactactctgtatgttaattgggccagtctattcatttattcacaaagcttttatttctctttaggctagcttgagagctcatctgtgatgaattttcctttatagaaaatatgttttaagatgagcagtatttttaaagtatatgtatattgatccatattttgtttatgactgtcaataattatgccagttatcagtaattgtcatatttttttcaggacttatatttgaaatgggaggatattagaatagcttatctcttaaagtattttaccttcataggtatctctatttatgttgacagctttttgacattcatactagtggcctattgggagaaatccacacgggccatcacagcaccatccagtactgtgacttctccccacaaaaccatttggcagtggttgctttgtcccagtactgtgtagaggtgagtagttgaatttattctgtgaagcctgggtttccagagatcaaaggatgacagagaatgggcagcttaaaccattaactgctgaggagccttgcttgagaaattatagagtattttctttatagcctaatgacctctaactttgggatattaaaccacatagccagctttattattttaacagtgattgcagacttgatttgacagtatgacagggaattcagcaagcatttgctgaatgcctaacatgtgccaggaactgggaaaacaatggaatgactgctggtcatgaaacatgacatctcttatccagtatagatatgtggcatttcttaaacagtgtaggcacagactcttttcttcttaaaaaaggtggtgagaaatgagtccagttcagatttcttagatcattgagtaggataagataggatgttcattgccaggcactaatgaataaaataactcatataaattacttttttatgattttgtacttacctgttaaattttatgttcagaatgtatacctagctggccctggaagaattccacccagtgaagtgctatattagttttttcataaagtagtgaattatttttttccttcaaagatggattagtgctttttttttttgttttttaatagaaatgggggtctcactgtgttgcccaggctggtcttgaactcttggcctcaagcaatactcccccagccttggcctcccaaaatgctgggattacaggtgtatcaccttgcctggccaaagatagattagtttttccaggctttcttagtcttcattccttaggttggttttaccaccaggtagtttgaaaccccttcagatcacagttccaagaagatgggtatgggccttttggaaaatagagaaattcactgggttcacaggctcctcatcaagggagccatgactactgcaagcacttcttcagtgttctctgcttatttagcaaattttagtgagtttgccagccttgcccattactgtgaaggtgttgggggagagttgctaagctatagcccttcaacatagaggcacaggtgagagtgagggcatgagatccataggcttctcctaattctaggtgcagcagtgcatgtgacactgaagaacttccctactgagactcttcccattgcacacagaggcagggagtgtgaaaaagctctagtcctgtatgaaacagcgggaagaagtagggtgctgtgggcagtgttttgttgggcagagactttgaattggaagtgttttgttttgtgttactttgtttttgagacagagtctctctctgtcacccaggctgcagtgtagtgttgtaatctcagctcactgcaacctccacctcccgggttcaagctattctcttgccttagctttctgagtagctgggattacaggtgcccaccagcatgcccggctaatttttttttgtatttttcatggagatagggtttcaccatgttggccagggtggtctcgaattcctgacctcaagtgatccacctgcctcagcctcccaaagtgctggggtttattgggttttagatctcctaggagatcttgaaccttatgtgtagatcctcaaagtaaatgtggagcgtttgttaggatttttagaaacagtactaagtagcaacccctctttcagcctttcttgtcacttctaaagtccttaccctctgccatccttagcaatctccaggaaacaatgaaagagtatcttccttcttgaaatgtagggactcagctctggaggctctgagtgacaaagaaatgatgggagagagatggggagaagaaagtgggaagagaggggaggattctcaagggagattttcagtttcttaggagagattttcagttgtggaaccactttcatttttggcccttagctctgtatgtcccagcttggactcttagagataaggcggagaaaatttcatataattagttcataaccacagaactcactgaatgaaaaccagtcactgggcctatgatgaggtacttgttttgtccatgctagttctgaaatgataaagtagttctgtaatttaaagtgtaatgagaggaactcagtcacatatggtacttcattagacttgaatatattagagtaatttacagcagaacccaggataaaataccaggctgctggtagacatggtaataagcatgaataacaagagaaatgtgtacatgttacaattattgtgttaatttattgtaggttttacagtcagttgaaatgaaggttagatgacagtattagtggaaaataatctgaatatggaagctgcttttgttcatcctattattttttggattgacttttttaaagtgataaaatatttgcatgattccaaagtcaaagttttataatgcgttatattcagagaagtcttgctttcatccctatcccttcgcctcgctctccctccttccctgcatatgtaaactattttctgtttttggcttaactgtccaatatttcttgcatatataagcagatatctatatgcatatatatccatacctgtatccttctatatgttcttgtacatatttttccatctcatataaaagatagtagtgtatagtatatagactcttctacactttgctttttttctgttaacaatatatcctagagatttgtcgtcatcaaggtgtttttctcattgtttttaatggctgcatgatattccattatgtgattaatgtagtttattcagttggttccctattgatgagtatttagtttcctagtattttgctataaaaaataatgatgcactaaataatcttctgcataagacattttgtagttttgatagtgtgtttctgagcaatattcattgaagtggtattgctggctcattcttgctattttcaatatttttgctctcttcaaaatgcttatgtatgtgatttcctatatgctgtgtttattctgtagttgtggaatacagactcacgttcaaaggtggctgattgcagaggacatttaagttgggttcatggtgtgatgttttctcctgatggatcatcatttttgacatcttctgatgaccagacaatcagggtgagaaatattgagattttcattttgaacatttcctgatggtgagctaaacctcctacaaactaagaaattgatgggtagcactgaggtaagcagaataggaaactagtactatattcctattcaccctggaaaagtgctgttatatggactgtaacagtctcattcattcgttacatgttcattgaggattaccatgggccaagtgctgtgggaacttcagtgattaaactgtattttggttaatttaaaatactgcatttgattcctcagaaaaatttttgacccttttctttaccttgaattcctacatccaattacttgccaattctgagagagtctaccttttcattttctattattatctctacctttccatttctgctgcccaagttcaggactttgttaactgttacttctcttgttgtattagtctctgccacaagtcttctttcttgcttttctgcatgcagcttctaagatatttttttttcatgtacaatgcagtcatgtcatttttgctcaaaaataagatagtggctcccttgtctaccaaagtaaatatatacttctgtttctgccattaagcttctccacagcatggccttattctgctccactctgtctcccagtttattcctacagggaaccaacactggactgctcacattttcccaaacactccgtagttccctgcttctgtgcttttccttaagtggtttcttatatttggaatgctctacttacctgtatctctgtttgttgaaatcctaaccattctataagtcccctcaagtcttctctatttggggagaatgcctgtctctcttaatgccatctaattctatgtcattttctagtggtgcttatcaaattttgacttgaatttaaatacagatatgatttactccttatttccaacactccactgcttctctggctcattgacgtatcttacattataagctctttgaggccaggaaccctggctggtccccacagcatcctaatacagcattatgtatgaattatagctaaaattcattcagtgcttactatattcaagacattatgcaaagtactatatatatatatatatatacatataaatttactaattctcacaatagtcccttttgcagatgaggaaacaggcagagaaagactgagaaaggtcattggttcttaacatgccagtctcaatgagcttgagccagaatataaatcaacacattgctttcttcatcaagaaagtcttcttgaaatgaaataagctgcatcactagacacagttacagtgtgtttagtgatgtagttgatttacgttctggtacaaacttctttttgtttttttgagacggagtctcgctctgtcgcccaggctggagtgcaatggcactatcttggctcactgcaacctccacctcccaggttcaagcaattctcctgtctcagcctcctgagtagctgggaccacaggtgcacaccaccatgcccagccaagttttgtatttttagtagaaatagggtttcaccatgttggtcagacgtcttgaactcctgacctcaggtgatctacccgccttggcctcccaaagtgctgggattacaggtgtgagcccctgcgcctggcccaaacttcttaccttgtggattggtatcaaacagtttgataaccagcaggaggtctttatctttgagtaacactgggttaagcaacctgcctgaagttacaactttaggtagaactagaattcatactgaggaattttggctctggagcccataactcttaatactaactgcatcttactatagattgtgttagtaaatatttatttttggattataatctaatattgaaacctttctagcatcataggtattttatgtgaaacatagtttgtctctcgctttaagatgaagacatgttattttagagatggaatgataatttctttatctcttaatcagctctgggagacaaagaaagtatgtaagaactctgctgtaatgttaaagcaagaagtagatgttgtgtttcaagaaaatgaagtgatggtccttgcagttgaccatataagacgtctgcaagtgagtattttttagaaaacaattggaaaattgttttggttgaattttctattcacggtttttcttgtttttggacttgagattaagcataattattttgtatctaacaggtgtccagcagacattagttaaataaatatatataagtcttgagctgaggctcagatatgcttatatttagaattaaattagataattcctcatctcactgctcttctgttgctatctatgatcacattctttgatttgcatggagtctaagaataccatgaggacaaactcatgttgtctacaagagtgattcagacatgtctgatggagtgtgcaagggggatgagcatatggaagcatttttaaaagggaaggattccagggtctttgaaagaacagaagtcactttaggtgaggaaggagtctgattgattggaactgaggtgaaaggagctgggctttacatactgaagtacacctgttcatttacacacacctttgttcagtaaatatttattgaatgcttattttggtccttgaggaggaaagggttgtatagtacaattgaaagaactgtattgcttagggatccaaacagcactactctagtctgttctccttctgccacccaacaaagagtgggacacgtgagaggaaggcatttctcaactagctgaagagagaaggagtcccaaagatccattggcagaggaatggtattcaggagctcggagtggtggtaacagatgccctaagagcagatgccctaaggagcactggaattcaagagcaggttggcatcactgtgctggtggctaaataaggtgtcgttgcattgacagagatgtcctggaagtggtgatagcgttgtagatagtggcagcaagagaaagcagatgcctcatggaagattaaaacacaagaggctatctatatgttggtcagcccaagcagaacagcagagtatggaccattgaaggaagtgtcagcatgtggagctgacagcatgtcactgtgacttgtggctgagagaggtggtaagagcaagcagccagataagaagggcaggaggtggcatggcttttatgtgaactggtgggacattctcccttgccctgaggattccctgagacataggattgagaaggacagaaaccctttcatagtgagggctaattttctttcttttgtttttcttttgagacagtttctctctgttgcctaggctggagtgcagtggcacgatcttggctcgctgcaacctccacctcctgggttcaagagattctcatgcctgagcctcctgagtagctgggactacatgtgtgctaccacgcatggctaatttttgtaattttagtagagacaggcttgtgccatgttggcctggctggtcttgaacacctgacctcaagtgatccacccacctcggcctcccaaagagctgggattataggtgtgagccaccgtgcccggcctaagggtttttttttttttttttttgtatttttagtagagatgaaactattttctcatagtatatttagggcctttcattagctcttgaagagcacgaatacagcttgagttaactttttccatatgggttttagaagtgctttattaacttctagggaaaggttttggcagtgataacatagtcttatgccatcttttcgtttgatttttcttgatttgcttattgaaagatagggagcatgaatgtgtgtgagagagtgaaatgagatagtgatgtcaagctagagaggagagagaggagcagaatagagaagacgagagtaatagagcacatgtgtggaaggtctgagaggaagcagacaattgagacagatggacagagggtaggacagagtttaatgagttgtcattcaaaaaatttttttttgtagagatgggggcatctcactatgttgaccacgctggtcttgaactcctggcctcaagtgctcctcctgcctcagcctcccagaatgctgggattacaggcaagagctgccatgccccactcaaaccttaacaagttgtaaagctgtagagctcagcttggtgtagtggagagaatagtgacttttcactaaggagacctaggtgtaagttcagacttctttatcaactagttctatgatgttgaataaattgtatcacgtctttgagcctcagtttgtaaaggtccttttcatctttacagtctctgagctagttacagggtcaaagtagaatccaaattcaggagtagatactgggagtaaatcgcctggtatgtggtaacttcttgtttactgtgggtgtcaaaatcaagctgtaagtcacctctgaatatggcttgctttgattttacaagttttactattgtcctcaatatgctgattaggagctcctaatgcacagtacttctggggtgaattgggatatggaattcaatgtgaatttctcattaactgttttttagaaagctgattcttccacttgggatatttctacttcagttttcttgacaaatttagtgtcctcatgcttgtatttcctttattaaatttgtgcaacctttctttaatgactgttgtaactgtgagacttaaaaagtcatctgtctataaaggtatcattctatgtcagtggttgtgggagagtttagaggataaacttaatagtttcatttaagtgaataaaacattttttagttactacttaaagaattcttgaaattgatttttgagagaagatgttcagctcttcgtagttcaattttcattttgaatatctaatagatcaaaatgtgctatgtaaaataatgttaaggaaaaactacctgtgattggttgactctgtaatctttgtactagaaacaaagatgcctgcctatttcatgttgaaaaataattcaagaattttagtttatgacactaagagagaggtatctgacaactgatttaagcttgagaaatattttcccaggtcacatgttttagatgagtgataaggcatcataattcatgggatttaagcattggtacagattatgaaattaggtaatctttgttcaagcattgtaaatccagctacacaaattatgcttatgagttcttctccattgtcctcactgccccagctccaagaaaaagaatcttaatttacactgttttgtgagtgatttggaggatataagccccattttaatttgtctttttatgtctgtctcagtcttgtttgaccaacagctttgaaatgtagcagaaaagtatattttaacaaatgatagccctattaaaagtgggctttgtgaagaaatggtgtggagctagctgtgggattacaaatcagatagatgtgtctcaggtggcgggcgcagcagctgctttttaaaccttgtaatgcttgttttattttatgaaaatgtatttgaaccaccaaagtggattgaaatgaaagtgtgaagtgctaaatgcagctgctaagactaggatatggcttgttgttcccctgagagctcttgttggttattttctgtgttttattttatttttttcaattgaagcctctgttctgacgaacaaaaactgctcttacagcctaataactgattttgcctcatttttcattagctcattaatggaagaacaggtcagattgattatctgactgaagctcaagttagctgctgttgcttaagtccacatcttcagtacattgcatttggagatgaaaatggagccattgaggtattcagtgctagtcttcagaatctttctgtacagaattaaataaaactaattatatgtctggcattgtgcacttctatttttatttatttttatttttgaaatggggtcttgctgtgtcacccacgctgagtacagtgacacgatcacagccgactgcagccttgaccttctgagctcaagtgattttcccacttaagcctcctgagtagctgggactaaaggtgtacgtcaccatgcccgactaattttttttttttgtagagatggggtcccctgtgttgcccaggctggtctcaaactcctgggtttaagcgattgtccggcctcagcctcccaaagtgtggggattataggcatgggagcttttgtgcctggctattgtataccttttttttttgaatcaggatctcaccttgttgcacaggctggagtgcagtggtacaatcttggctcactgcagcctttgcctcccaggctcaagcaatcctcccaccacagcctgctgagtaactgggacttcaggtatgcaccaccacacctagctaatttttctgtttttgtagagatggaggtttcaccagtgttgcccaggctggccttaaactcttgggctcaagtgatctacccatcttggcctcccagagtgttgggattacaggcatgagccaccacatccagcctattgtacacttttatactaaataaatctttctgtgatctattagtcattgttcgttaaactaacaatcatcttatccagttggctgtatatttttcagatttcctttattactgtttctcatgctttttgtctttttatgtcccttattctctacttagttgtttggctgttctccacatatatcaaatactatctatcaagatttcgctaactatgcaaagagcatttttttctcctcttcttagaagcccagccatgtggggtataagttgtttccatttcggtactgataaggctcatggggaatatgggtgcagggctgcctgtgcttgcctgttccaccaatccttgctgttctacttttggtggcagaagaacctcagttcaccacctgaaatccttaatttatctaacaagaccaaataggtaaaaatagaaacactttgcaaggcaaaaatgtagtataataaaaggcattttgggtaaaaatattgttgtctttatcacaagtgaaattcatcccaaaagcacattttctctagctttatagtggtttttcaaaaaccttggttccttctctcactttttctcaccaggtgtctgggaattattttttaaccaattacttatggcactggccacagttattttactttggattcattttcataaggaattacacaaatattctctagtccatatggccccacagagaagagactatatgcttagacacaaagtgaagaaggaagcatttacacagtgatctcaatactcttatatatttgtcatggcccttatgtcatggattgagagttcaggctttgttttctctttattattgtgaaaaatttatttatcatttgttaagatgtgtactattctgggataaagtacatcatggatatgtatttcttaagcaagggataattgtatgtttacaggtgaaccttaggcttccatctcaggctcatctctcaaactgttgtgtattattatttattcttaaagagtccttggtttcccttttctctttaccttgatgccaagtcagtaccacattcttttcatttttaccatctatcttaaaataagtcttttagatagtttaaaaataaactcacaacacacatatgtgcttcatccacatcgttagttccctcaaagtcatcaaataatataaataatacataatgaaccatgtgaaattaccagcatttacctataaagtggcagtttcatatggtgtagcctcatatcatcaaataatagcaactaccatttattaactgtttactgtgccagatgctctcattgaattcttataacatcctggatgttcgatgttgttattcttgttttaaagatgtctaaactcttatttccacaattttcataaaatcagtaagtggcagagctaggattcaaacccagatctctgaggctgtgtgctcaactgttatgctatcctgcccttgcctcagggtttgtgagatcgttcatcccgctcatttaggaaggtttccattcacacaattcccctttgttttcaaggggcttttcttccagacgtgggttaggtttgagtttctggtgtctcctgctttagcatcatctgtattttccttaggctttcttgagtacattttaatttggtcaatgaaacatatttcctctctttttgtttttttggtatgagttcatttgaaagcctttttttttctttttttttttttgacatagtcattatcttttgaatttgttactacttttatttagagtattattagtctttggccctcttaagtattctcattgcactgcccaccagccttctgatatcctgtctccctcatcatcttttatctttccttgtttgtgttgttttatgaataatttgccttctcatccaggacttacttactttcttctctcttatccatcttaaatgtctttttttttttttttggagggcaagcccagacagccacttgtttgatgaagtgggtagttgagtactcagaaggaccactggttcctactgctgtctgatgattgcagtgagtgttttattttagggtccaatatgtttgcatgtaggcatacatggtgtgcatatatatatatatatatatatatatatatatatatatatatatatgacattcatttgtttttaattaggctggaagcaccagatggaaattctgtaccctccagtctaattttagtttaatatctttggggtgtaatgcctatgtattgcttagtttcttcttaattttctgtgtttttctgctttgaagattttagaacttgtaaacaatagaatcttccagtccaggtttcagcacaagaaaactgtatggcacatccagttcacagccgatgagaagactcttatttcaagttctgatgatgctgaaattcaggtgagagggaggatgaactcttaacatatttaatgctgattctagcaaaggaacactatgattatgcctaaaatctggtgtatattttaaacacattacgttgggcatacattcagattatgtacatgggcttagatgaaacctatgggtgtttcatatttttctgtgggtgaggcagacagtttatcttagaatcctctgttggaaggttgtttattttgaaaatgaagggtttgtttgcattttcttgcctgtcttggtatttggatttgtatcagtaagtatactttttgccacatttatgtaatttctctttatttttctttacagtagtaaaatccaatggaaatcatttcattctttccttttaagaacaaaatgtttattacaggaatgaaattctgtgaaaagagaatggtttgacataataaagaattgtggatatggaggcctaaacttactatatattcttttaaaatttacttgattattaaagtcccaatgcacattcttttaaaattcaaatagtattacaagacttattatgaaaaacagaccctttcccccatttctcgttctccagaggcaccacttttagcttttagatgattcttttgatattaccttcatgcctctatatggcatgcttatagtgctcttcttgattttcccatttgagaagttatctaccgaattccctacaggaagatgttgcttttttccgccttccacctgtcctgccttcagcttatgtgcatgcacacgttcacagacactcatttatcaatccatttatcccaattataacgaaattttgtttagatccttcctgttactatgatcactgtgtactaagggtactgtgaatgcattttttgccttaacgcaatttaggaaaatttgacctttgggtgtagttggaaattattttacactaaaactttgaagacattgctccattttcttccaagttccaaagttcacgttgaaaagtctgaagccattttgctgcctaatctttctctctggaagattttaggatcttcattttatccccagaatcttgaaatttcctgatgatacactgtgttgttagtttttattcattgttttggatattcagtcttccttttcaatttggaaacctatgatttttaattcatggaagttgaattatttctttgattctttcctttttgttccagtttgctttctctttttgtaacacccattattcagatgttagatctcccggactgataatctagttttctttttccacatttcatctttctatagtgtgctttatgtttttttctttatttttttttgagatggagtctcactctgtcacccaggctggagtgcagtggcgcgatcttggctcactgtaacctctgcctcctgggttcaggcaattctcctggctcagcctcctgagtagctgggattacagccgtatgccaccatgccaagctaattttttgtattttttttagtagagatgagattccaccatgctggccaggctggtcttgaactcctgaccttgtgatccgcccgcctcggcctcccaaagtgctgggattacaggcatgagcccccgcacctggcctactgtgctctatttttggggagttttcctcagttttgccttccagccattttattgagtttttcatttctactagtatatttctaatgtgttaaattcttattttgtagatagaatattttatctctctgaggagatatacacacagacaggtaaatatatataatatatatatagaaattatatacacacacacacacatataatttttttttgtttttttttgagacggagtttcactcttgttgcctaggctggagtgcaatggtgcgaccttggcttgctgcaacctccgcctcctgggttcaagcgattctcctgcctcagcctcctgagtatctgggattgcaggcatgcacaaccacaccctgctaatttttgtatatttagtagagatggggtttcttcatgttggtcaggctggtcttgaactctggacctcaggtgatccacccaccttggcctcccaatgtgctgggattacaggcatgagccactgtgcctggcttatatatataattttttccccataaatttttgttttgctgcatagttgctgttccctccaagttgcttttttctgtttggttgttttgacctcctattttgaaggcctccttagctctcagtggtcattggctatcagagatctgtactgaacaactggctgaaagctctgtgtgttgactgagatcttctctaaaaggtgaatctgaaaggggaaactttgttgtgagtatcttcaggtcttttgtcttggtctcctcagattcctagagaggaattttctggtcttttgcctggaggataaacctggctggcaggttctcagagctaagttggggaagataacaggaagtattaatagatgttggatctcaacatttagtatgtacaccttcccttgatccctcattctcagaattgtaattctaccctcagttgtgctggtgcccttaaattcagagattcttctttctagtttgctgtcactgtctgtctactttcttcctttttttcccatagtaactttgggattcaacagcaattcttttcttttctttttctttcttttttttctttttgagacagtcttgctctattgcctaggccggagtgcagtggtgcaatctcggctcactgaaacctccacctccgaggttcaagtgattcttctgcttcagcctcctgagtagctgggattacaggcacctgccatcacatgcagctaatttttttgtatttttagtagagacaaggtttcacgatgttggccaggctggtcttgaactcctgatctcaagtgatctcaccttggcctcccaaagtgctgggattacaggtgtgagccaccgtgcccggccttcttttttatgtaaaatcaagtttcctaaactccttggaggagtggggaagtccagcatttctagcttcacagctctgcagctcgttctcttattttcacgaggcattaaaaatatggccttactgggcgcagcggctcacacctttaatcccagcactttgggagtctgaggtgggaggattgcttgaggcaggagttagagaccagcctgggcaacatagcgagaccccatctctgcaaaacaaaataatttagccaggtgtggtagtgcatgcctataatcccagctactcaggaggctgaggttggaggatcgcttgagcctaggaggtccaggctggagtgagctatgatcatgctaccgcactccagcctgggcaacagagcaagtccccatctcaaatatataatggccttgttcttaggagatctctttgccccatctccttccctctcagttatttcgaccttctctttcctttgatgcccttatcctcgttctactccattggattctattccctgtggtttctcctcactgtagggttgttctggttaattttgagagctcacaaggctcacactgctccagtccttccagactgtacctcacactcagtgtctcctgctcttctctagttgttccattgcacttttcggtgaacactgtgtggctatcttaggattctctgcctcctaattcttaatacttatattcttagccccaccctcatttcctcctttgggtatacttagtgccttccatttttgagcattttgggagttcataatgccgattttgttgctttagactttttcttttcttttcttttttttgagacagtcttgctctgttgccaggctggagtgcagtggcatgatcttggctcactgcagcctccgcctcctgggttcaagcaattcccctgcctcagcctcctgagtagctgggactacaggcccgtgccaccatttccggctaatttttttttttttttttagtagagttggggtttcaccatgttggccaggatggtctcgatctcttgaccttgtgatcctcccgcctcagcctcccaaagtgctgggattacaagcgtaagccaccacgcctggccacttttgactttttataatgcctttaggattctgttttcttgactttgctgagtcagttaccattctcttgctttccagcctcccacattttgttgctgttatctcctttctcattcttttgatcttgccattttagtagggctttagaagtgaaggatagaatgcatatgttcagtggaaattattatattcttttatttagtatatatattaattgtggtggcaatatttaattgtattgttaaaaacccttttgggaaaaagatcttttaatgttatgtctgtgtgagtcctaggaagcagtatgattgcaatgaaatttggctttagtacagaaacttacttgttataggctcccatgacactggtgttctagctgtaaaactcagtgtaatagtcacctttcttcctctccagatgtctttggaatgggtaaaactaaaaactacatctgatgaagttcttttgagacattgtatactatgtattctatcaaaagttaaattcataaggtttttatgaccagcttgacgatttcaggtattctcagctagggggaagaataatttctagagatatttttagaaaaggagttagattatatttagaaatatgagttaagtagttgtgtttcttcctctttttctgttctactcagaatactttttacatttacagtgttttaaatgtaacaaaactctatagatattttcgagaaatgactggttgggttttgttttcattttttaaggtttttgtaaatgattaagtggaggtttgttttaattatctttgtatccccaaagcctggaatccagtaagggttctgtaaatctttgctgagctgaagttattgccaaactttgaagaatcagctcacctgattatagcccttaggattgtgaacattgaggtctactttggtagtttttgatcctttaccttgaagtaaataaaggccaagtattacccatgcttacatgagccagtatataggactatgttagttcttgctggtatgaaaagtttccagccgggtgcggtggctcacgcctgtaatcccggcactttgggaggccgaggcgggcggatcacgaggtcaggagatcgagaccatcctggctaacacggtgaaaccccatctctactaaaaaatacaaaaaaattagccaggcgtggtgacaggcacctgtagtcccagctactcaggaggctgaggcaggagaatggcatgaatctgggaggcgaagcttgcagtgagctgagatcccgccactacactccagcctgggcgacagagcaagactctgtctcaaaaaaaaagaaaaaaaaaatttccttaacatttctacaatttaaattttattcatatagctgaaaaaaattctacaagtatatatacattgcaaaaatagtcaatgatagagacatccccaaactcaacttttgcatttgactaatggtggtggaagtttagtgatattaaggttattcaattagcacagtgtgtttccgtgcaacaacaacaacaacaacaaatcactcatcatcattgcctagtcagaaaccttctgtaacaaaagctgcaaaggctattcttaatctgccctcagtggttgtcaaattctttgttatatctgctccagaaggctgtctgagttcttgatgcagagggcagaagtaagatactaagttagaaatgaacattgaatcaggcaaagctagaataggcagtgtctgtaaactaggaggagctgttcagcatagccattgatcctccagtccagtgaagcccagaaagcgggaggagagagccaggagtttcctagtagaaatggaataaggtcttttatgcttagtcatatggggtgcccttcctctctggtatgatttgggaagccagaaatgcctccatttcttccccttcccccagcatatctcattgggttcttaaaatatgaaaattactaattcattctctttagaattactctcacttccagttcgtcttctaaagttctcttgcttgcatacaagaccccatgctcctgatatcctgcttctgtgaatgagcattctgaggcagaagatgagagatctgaaagccagggcttgttggggaggacgactgctaaatgtggtggaaaaagaagtaaaaaaaaggggaataagagatgtcatttattttaagattttgcctaggtctgattaaagatatttctgctgtttagcattggccaataaaaagctagactcagaatgttactcatgtgcatacctgtagttgtggctgctttttctttatctttttattcttttggagctggcctgttttcccatacctcagaattttagcttcatcaggcccacggggctgtttctttggataccttcccaaccttttttctcttctgtttcttctgcgtctcctatgctctagtcagatggactcatgagcaggtcccttttcacgtttccctgctcctatactttaactccaacatttattccctttgaagaacccttctcagtttgtgaatcacactttaaacccattcctcaagcctactttgaatgtgctatctccaaattttctctaaggaattactttttttgagtttcacagaacttttatctctatcattgtatcttctattgtaggactttttgggtttgttgttgtatttctcattttctttgctaaactcttaagtttctttatgctagatccttgtttgattcctatttgccttgcatataggtactaaatagacatttattaaataagttaatttgaagtcaagtattaataaagctctaaatacagttgcttttagtaattaagaaatgtcctttacatagacatagcataaaaataaacttctgtgtacctctgtgtctcagatacgtttgtatgcatattttgtgctagttactcatgttatttcattccccccacccctttccttatgtctgaggagctcctcctgaagctccacatgaaaaacaatgccttctcacttccgtcattttgaggattgcgatgggggatagctgagatatttgaagcttgggaactcttgtgttttggtttgaagctgctttgatcaactggccttcccaggccagcttcagtggggccaggatctgtagacttccccagcttgtaggttcagaaatctgtgactatgtaattaggataattttctcaggaaaatttaatcagatggtgagctcactggcatattgtgtgtttttttttttctatcttctggtataattaactgttctccaagcaactgaagaaaacaaattttatttaggaggaaaagtattttattttgcccctagtcaatttacataaccgcagcttctgtctgtaaaatgtggacaccacagtcttctctcttattcctctctgttttactgaaatgccatgtgagtaaaagactttagacaagagaatgtacactctctccacccctccaatgagataggatcgggggaggattataacagacttatttctttgatattcaggtatggaattggcaattggacaaatgtatctttctacgaggccatcaggaaacagtgaaagactttagactcttgaaaaattcaagactgctttcttggtcatttgatggaacagtgaaggtaatttaaagtataaatttgttttttgaaaaagtattctcatattgcaatgattatattgagacagtcaaaagccactgtgaggctaattacttacttaaaaatttttaatttttctcatgcttgttttctgttaattgcagtcacctacatctgctgtgtttaatgagcatttatactgttagtcacatttaaagtaaaggggtcagaacagccagtgtattaaaactcttgttttatagacctgtcttgtagctgattatgctttttaatataaaatgttcttaaaagtgtcaacctccaagtgttttttttttttttttaaggtatggaatattattactggaaataaagaaaaagactttgtctgtcaccagggtacagtactttcttgtgacatttctcacgatgctaccaagttttcatctacctctgctgacaagactgcaaaggtaggtcaatcaattgaaaccatgcataaaactttggtagtggttatgtataatgagttcaaataatatatgcaaaaggacataacagttgctctctacatgtctgtttcatattttgtgatcttttggaggatgcccattggcatttagttggtatcaaatgaatgaaatgaaatacattgaggacttctgatttctcccttatggattactttttgtctataactaatcaaatgcaacctctactgcatattgtaggcaataaaaatcattgaaaagcatttacatttaattatacactgacaatacaattttaatataattaatgtaatataattgacgtgtgtctaaaatcacattctggtgaatgatgctgcttggtgggggacctcaagtactctcttctctccttttttctccttctaccagtctttccaaactataaaccttggaattgtcagggctgtatcctgtcttttgtgctctgttgatgactctttagtgcatcttagagttatcttctcctctttgtcaccaccctgaagagcatgctttcctcctcctccactggtgaactgtcccagcatcctgcctctggtctgcacctcttccactttatcttccataccactgcctgtgtcccttgttgaaacacctattacctaacggtttataggccaaccacttagctcctcaccatctttttctgctatattgtttcctctgtgccagcctactttccaacttcatctttttgtgcatgctgctaactttggtttgataaaccttctactcttttaccttgaagcattatgactcatctttctagacctagatttgatggcagctcttctgaagcgtttcctgaccctcaagcaaggttagctgctctacctccagtgtttctattacattttattcatttgttagaacatttacttcatacaactgttcactaactgttcgtgagcctgtctttgtgattaaactataaacttttcaaggatagtgactgtagctagtttatcttcttgtaccactagttcttagctcacagcgcttggaacttggtagttttcagtatgtggttgctaaatgatgttgacaaaaccatgagacaatattgaaagaaaaaaaaaatagcatttggctgccaagaagtaggctagtatagtgactaacatttaaagattacttgtcacatgctagtaatttcactctctataatctcatttaatcttcacatcataggtacaattgtcctcattttacagatgccgtgtctgaagctatagaagcttatatgagttgtcctagtcacaagaatctagtgaacagtggagctagcactcacattcaggtctgcttcactccacagactgctcttagctgattcagtgttcttctgtctaggtctaaattaaggaaggagtgacattgatccttgagctgaatttaacttgagtaaataaagggaaactcagaaaaattaacaaggttgcatgctggaacttgggcatctcatgacagtttatgaattgccagatattagaatgtccatgtgattgaatttatggctgaatagcaatcaaggcagatgcttattttgagtgtttatagcattgctaaacaatcctaattgccttccagatctggagttttgatctccttttgccacttcatgaattgaggggccacaacggctgtgtgcgctgctctgccttctctgtggacagtaccctgctggcaacgggagatgacaatggagaaatcagggtaggctgtttgctgacatgagagcactgctcttcttgtagcttgggctagcactgttcacagtggggacctttgttcacgggccagggaagcatagtcctgaagttgtggttggatgaggcattctttttgtttcttgtgcacattgtattcacagctgcactccactgcagaaacggattcattttagagttagagtgaagcattccctgtatatgtgaggaagcaagtgctctagtcatttgtagttcattctctgccattagcttgagaatgattcatcttaattcttggacttgaaccaaaggtttttggtagcagaatttgaggaaaataattttgtaaattatggtctggattataaatgaattgcaaattctgctttttctgtgctgaaagaaaagatctctttagcactatacccatttgatagccatttccagtgtggtttgttgcagtcctctgtggactgcctgcctgttaaacagtgcagaggttcacatttccgtcattgtggggcagcgaagggctcctaattgagtcacagtctgcatgctaggccagtttttattaccctgcagtgcttaagatatacatacaaaccatgccaattttatttagaaaacaatctattttttttagatatataattttgacttttagaaaacaatctttttaggaggcttagaatgttgttctctgtgtctgtggaaatatagtaccatatggaaagaattgcatgctgaaagattagaaattatggaaaaggagtcagttgacctagttgtgtcagaagaattggggagccgattggaaaagtttgggtattgggatgactactttggtaaccagtgtagatgaggaagatggggttttccccctttcattacaaaggaggatctaaaactccaggaacaggtatatagtgcagaagactaggagagtatacagtttgcaggaacagaggtgttatcagatgggctttccagggaaattaagattcttcttcttgaggactaagtaaccaaccttctctctaccagtcacataaatgtgtgtcagctgaagtggcagggctgctttggaaatgttcattttgctctgagttcgcgtctttggatgaaagtgctcctttcccagttatgaggcggtgtttcatttttcaaccactgcaggaaaaagttgtctccattaaaattgtgttattttaaaaatttttgttggtacattaaaaaaatttttttctccctgattattcagaatataggaaagttactgatttttgtttgtatatgtactaccttactgaactgtttctaatgagtttttccattcggttctcttggattttctagggagagatttacaaatgattgtttaattttcttttaccatttatgcctctgtttctttttcttattctggtgtacctttatttgaaaaattagagcactgcttatatattaaatgccactggaaataaatggcaatattagtatctgtgttagggttgtttataataaagtctagtaaaataattttagaatacatatatatggacatatatatgttttaaaaccagagaagcttctggataactctgttaatgaattgtgtatcatgtttatgtagatatggaatgtctcaaacggtgagcttcttcatttgtgtgctccgctttcagaagaaggagctgctacccatggaggctgggtgactgacctttgcttttctccagatggcaaaatgcttatctctgctggaggatatattaaggtaagagttccccaagaactgtgaaagaaaataatagcctatatcatactttccaagctattttcacttcctgtttctcagttgggccttttacaacccagcagagtaaaaaggctgctactccggaggctaaggtgggaggatcgctggagtctgtgaggtcaaggctgctttgagccatgcttgcgccacttcactccaccctgggtgacagagcgacatcctgtctcaaaaaaaaaaaaaaaaatctggcagtaaaatgagtttagtaactaaagaaaagaacagaaaaaaatattgaaaacaaaaaagaaccagaaaaaactttaaaaaataattaaaagccaggcacggtggctcacgcctgtaatcctagcactttgggaggccaaggtgggcggatcacctgaggtcaggagtttgagaccagcctggccaacatggcgaaaccctgtctctactaaaaatacaaaaaatagccgggcgtggtggcatatgcctgtaatcccagctacttgggaggctgaggcaggagaatcgcttgaacccgggaggtgaaggttgcagtgagccgagatcacaccattgcactgcagcctaggcaacaagagcaaaactctgtctcaaaaaagaaaataaataaataaataaattaattaattaattaattaaaaaaataaataaaaaggaaaagaaaaaaaaaggcagttactattatccccattttgtagtgatgaaactgagatccacaagactgctttcctcagatcttggggaagctttggtgacagtggcagggatgccctcaatccagagctgtcatactgcctcatactaaacttggggcattagaatgactagcaagttgggtgtttaacttagttctgttttccatgtcattcacaattaactatgttggttgaaaatctttaaaaaaacatatttttgaaatttcttcagtaataataatagcagcagtatatggctttatagtttacaaaacgcttcactcccctcatcttactagccagctttttgaggcttaaatttcattcttggtttacagatgaggaaaatgattttctatggaggttataactttcctaaagttacataattagtgccgggtgtggtgactcacacctgtaatcccagcactttgggaggccaaggcgggcagatcacttgaggtcagaagttgaagaccagcctggccaacatggcaaaacgccatctctgctaaaaaatacaaaaattagctgggttttgtggcgggcacctgtagtcccagctacttgggaggctgagaggtgagactcacttgaaccccgggggagcagaagttgcagtcagctaaggtcacaccactgtactccagcctgggcaacagagcgagactatctcaaaaacaaacaaacaaaaaaaccaaaaataaagttacataattagtaaatagaaaagccaggactcaaacccaggtctctgcctctgctttctctagctaattggctttttaaaacttactagtgattgaggccgcaatttgaatgtgttgtggtgcttcagggtcatatttttggtgtttttttgatgtatcttttatctatccactcaaaaagactgtgttgaatgtccagtgtgtgctaagctactgctctgtggcacaatgtttatggcttggttcctgcctttcagcagcttacagtctatgggggaagcaggtggtaaaccaataaagtccctaaagtttagaaggggtctgggacatgctttcatgagggaggtggaagcacaaaggagaggagtgaccagaccaacctcagagagttagcagaggcttcacctggaggggaatgcttgaagtgagtcttttgaatagcagtttacttgtaaaagtggtagaagatgatactctatatcagcggtccccagcctttttggcactagggactggtttccttggaagacaatttttccacagatggggtggtggtaggaagtggggagcggggaatggtttcaggattaaactgttccacctcagatcatcagcattagattctcgtaaggagtgcacaagctagatccctcgcatgtgcagttcacagcagggctcttgctcctgtgagaaactaatgccaccactgatctctcaggagacaaagctcaggtggtaatgttcactcaccagccgctcaccttctgctctgcggatgggttcctaaaaggccacagaccagtaccggtccatggcccagggactggggactcctctatattgggctgatcacttggacattctgaaagctttttcattcaaaattgattcctaataagatcttatgatactgttatttcttactgaaaacattcaagtgtaggagatgattctcattaattgtctaaggcaggataagtgtttggaaatatttgaatgactggtgttttggttacatgagacccacacagctgcaattttaccaccataagaatctagcttataaaaaagataaattagaggacagtttttagctttatgaaaggatgtactaaggggtacaaaaatacagataaacaaaaggagtaatttctagtatttgataatacagtagggaaattatagttaacaatttattgtatatttcaaaatagctagaagaattataatgttcccaacacaaagaaaagataaatatttgaggtggatatcccaattatcctaatttgatcattacacattgtatcacatgtacccccaaaatatgtacaacttaattatcaataaaaatttttttaaaaaagaaaggatgtatgttatccctttacaaggtttcattgaaaacacaattctgtttacaaaatgttgcattaacctacatctttattcagttattaggagatcctgagaaatgaccaccaattgttctcctttagtgtaaagataaactagaactcagtctgctctggggatgatgcttagaggagagtcattgctgtctgtgttggaagctggggagtcttcggctatattagctgctgacaaatttaactgctcagctttgacaccaagtttctagagaccacatcatttgattctctggcctccacagaattccatcacataattgagagtctggtttataagatgttacaaagatcagtgaccatatttgcagagttcttggggaaccttgaaataaagcagcagaataggtttacatagtatagatgttatgtctgaagggtgaaagaacttctagcctatgtatttagtttgtatatttaaatgacaatcaggctgcctttgccttctggtttgattactagcttattcaactgattatgatatagcccagcctgcatctacccagcatgttaatgagactatccaaaagcacagagcaaattaaaagtaaaaaggaacagctgctgtagtgtccaagaaaataggccttttgagcctgtttactttagaatccaagctgtataaattgagtgccagtaagataaagtaggtatccagaagcttaaaaagttcttaacttccaaattattcctatttataagtgaaaaaataatttagctgtttacctgcattatgccacagagtacatactgaatgacaagaaattcacattaattcatgtgcatgaagggaaagctgatctgaagtatggaatacatggtgataaatggtggtgtgccatgacttggtggcagcagagtgtaatggtcaggagagtgggcttttggccttgagataggctgcctgagttcaaagcctgcctctgccactcattagctttgtgaccttgcacaagattgtttaacttctgtgccttgattttcttatctgtaaattgatgtaatgataatacctaactcatttcacagatttcccatatacccctttcccccacaaacacatagcctcttccattatgaacatccccccaccagagatgtgcatttgttacaattgatggatccacattgacacatcattatcacccacagtccgtaattagggtttgttcttggtgctgtacatttttcgggtagttgaactaagtgatctctaagagccttagtgactgaaaacaaatgaatctcaggttggtggaatgtgcttgattacactgttattttacaaagcaaacttgtgagttctggaaaatcccaagttagtgcatgctggttcagtgaggtttaccaaagtccattgggtatacttttagcagttactattactaatagtgaacatgcttacttgacccactcacatgggaaagacaaaatgctaggtactgccataggcacaaaggtgggtgacactattactgtgttcataatactcaggatcatggtgagcttgaggccttttcagaataagtttacatgtattgtctcttgcccccattttagctgtgagattcatgggtaaactttatgattcccatttgttaaatgaatataaatattataagcaaattcagtgattgggaaggaaaggaaggacttggctacagcccttgctacgtttgagatgttcagtatttgtttagtaaataaataatatagattattttataaagaaacttggtcaagggctcttgcatcacacctggggaaagggaagattcagtagagagaacattgtttcctgtagcccatattatgaatagtttgggtctctgtcagaataccagtctgtgtctgcaaaggggcatttgagtgaagagagggggaatcttctgcccattctcccgagaaggacatgcagacaagagagttgagtctggccactgctgtaatggactctatagcttcctgtctgcagctctcaagcaggctgcatgtttctccagcacaactcaacggttggagttgggtgtaggcggagcagtgaggccatcaccagtgttcatcaggaagaggctgaccaggttgaatagtatattcagcattaaatccgagacattttcctcctgtttgcttgagttcggttggggggaggagatagggtaaaggatctgctggcactataaattgtcacacagtgtaattaccaatctaatgagaattttatttttctctgaacagtggtggaacgttgtcactggggaatcctcacagaccttctacacaaatggaaccaatcttaagaaaatacacgtgtcccctgacttcaaaacatatgtgactgtggataatcttggtattttatatattttacagactttagaataaaatagttaagcattaatgtagttgaactttttaaatttttgaattggaaaaaaattctaatgaaaccctgatatcaactttttataaagctcttaattgttgtgcagtattgcattcattacaaaagtgtttgtggttggatgaataatattaatgtagctttttcccaaatgaacatacctttaatcttgtttttcatgatcatcattaacagtttgtccttaggatgcaaatgaaaatgtgaatacataccttgttgtactgttggtaaaattctgtcttgatgcattcaaaatggttgacataattaatgagaagaatttggaagaaattggtattttaatactgtctgtatttattactgttatgcaggctgtgcctcagggtagcagtggcctgctttttgaaccacacttaccccaagggggttttgttctcctaaatacaatcttagaggttttttgcactctttaaatttgctttaaaaatattgtgtctgtgtgcatagtctgcagcatttcctttaattgactcaataagtgagtcttggatttagcaggcccccccaccttttttttttgtttttggagacagagtcttgctttgttgccaggctggagtgcagtggcgcgatctcggctcaccacaatcgctgcctcctgggttcaagcaattctcctgcctcagcctcccgagtagctgggactacaggtgtgcgcacatgccaggctaatttttgtatttttagtagagacggggtttcaccatgttggccgggatggtctcgatctcttgacctcatgatctacccgccttggcctcccaaagtgctgagattacaggcgtgagccaccgtgcctggccaggccccttctcttttaatggagacagggtcttgcactatcacccaggctggagtgcagtggcataatcatacctcattgcagcctcagactcctgggttcaagcaatcctcctgcctcagcctcccaagtagctgagactacaggcacgagccaccacacccagctaatttttaagttttcttgtagagacagggtctcactatgttgtctaggctggtcttgaactcttggcctcaagtaatcctcctgcctcagcctcccaaagtgttgggattgcagatatgagccactggcctggccttcagcagttctttttgtgaagtaaaacttgtatgttggaaagagtagattttattggtctacccttttctcactgtagctgctggcagccctgtgccatatctggactctagttgtcagtatctgagttggacactattcctgctccctcttgtttcttacatatcagacttcttacttgaatgaaacctgatctttcctaatcctcacttttttcttttttaaaaagcagtttctccactgctaaatgttagtcattgaggtggggccaattttaatcataagccttaataagatttttctaagaaatgtgaaatagaacaattttcatctaattccatttacttttagatgaatggcattgtgaatgccattcttttaatgaatttcaagagaattctctggttttctgtgtaattccagatgagtcactgtaactctagaagattaaccttccagccaacctattttcctttcccttgtctctctcatcctcttttccttccttctttcctttctcttcttttatctccaaggttaatcaggaaaaatagcttttgacaggggaaaaaactcaataactagctatttttgacctcctgatcaggaactttagttgaagcgtaaatctaaagaaacattttctctgaaatatattattaagggcaatggagataaattaatagtagatgtggttcccagaaaatataatcaaaattcaaagattttttttgtttctgtaactggaactaaatcaaatgattactagtgttaatagtagataacttgtttttattgttggtgcatattagtataactgtggggtaggtcggggagagggtaagggaatagatcactcagatgtattttagataagctatttagcctttgatggaatcataaatacagtgaatacaatcctttgcattgttaaggaggttttttgtttttaaatggtgggtcaaggagctagtttacaggcttactgtgatttaagcaaatgtgaaaagtgaaaccttaattttatcaaaagaaatttctgtaaatggtatgtctccttagaatacccaaatcataattttatttgtacacactgttaggggctcatctcatgtaggcagagtataaagtattaccttttggaattaaaagccactgactgttataaagtataacaacacacatcaggttttaaaaagccttgaatggcccttgtcttaaaaagaaattaggagccaggtgcggtggcacgtgcctgtaatcccagctccttgggaggctaagacaggaggattccttgagccctggagtttgagtccagcctgggtgacatagcaagaccctgtcttaaaagaaaaatgggaagaaagacaaggtaacatgaagaaagaagagatacctagtatgatggagctgcaaatttcatggcagttcatgcagtcggtcaagaggaggattttgttttgtagtttgcagatgagcatttctaaagcattttcccttgctgtatttttttgtattataaattacattggacttcatatatataatttttttttacattatatgtctcttgtatgttttgaaactcttgtatttatgatatagcttatatgatttttttgccttggtatacattttaaaatatgaatttaaaaaatttttgtaaaaataaaattcacaaaattgttttgaaaaaca

SEQ ID NO: 26 - DNA, 25255 bp, Homo sapiens
cctacccgcgcgcaggccaagttgctgaatcaatggagccctccccaacccgggcgttccccagcgaggcttccttcccatcctcctgaccaccggggcttttcgtgagctcgtctctgatctcgcgcaagagtgacacacaggtgttcaaagacgcttctggggagtgagggaagcggtttacgagtgacttggctggagcctcaggggcgggcactggcacggaacacaccctgaggccagccctggctgcccaggcggagctgcctcttctcccgcgggttggtggacccgctcagtacggagttggggaagctctttcacttcggaggattgctcaacaaccatgctgggcatctggaccctcctacctctggtgagccctctcctgcccgggtggaggcttaccccgtcttagtcccggggataggcaaagtggggcgggcgcgggacgcgtgcgggattgcggcggcagcggcgcacgcgggcacctgggagcggcgggctgctgcgggaggcgttggagactggctcccgggggctgttaggaccttccctcaggcccgggtgctcagaacgctggaggacttgcttttcttgggccttgatgcgaagtgctgaccccgctgggcaggcggggcagctccggcgctcctcggagaccactgcgctccacgttgaggtgggcgtggggtgcggacaggaattgaagcggaagtctgggaagctttagggtcgctggagggggaccccggttggagagaggagcggaactcctggacaagccctgacaagccaagccaaaggtccgctccggcgcgggtgggtgagtgcgcgccgccccgcgggggcggggagagagcctgcagccttcagaacagatattgctcattttctggcagttctcagacgtaggaaataagtcagcaccgaagcagtggttaagccggagggctcggaagaacggcaccttttctttctcgaaaaagttatatgggggctgaatgagcttctggaggcttgtttaccgttttttattgtcacacagaaaaagaaactgccttgtctcccttccgggaattctctctttaagactgtaagtcgctgcctgagtggtttcattttgttttgtttttctgcccttctctttcttcttttgccctttcttagcttgcactcccatggtgatttctgcttggtctcctgctggggttggtggtactcgttcccaccgcacagaacccggcgcctattattggccaagaaacttgagcagcctgttttgaaaagtccctcgctcagaaatgccagcttgcagatggctaatcaaagagacgtggatccaggaggctcatttgagtaccggagcctctgagagtccatggatttttattttattgggccccaacaaagtgccaggcatagcgagagaagtgtttacaaatgtgatctccgcggattctcacgagagccatgtagtggggaagataaccacatccccattttacagatggcgaaatgaggttcagagagcttcagtaattcagccaagatcacacagctagtaaatgggagatatgggattgaactcagatctaattccaaaactcaggctgttcgctgattgcatctgatatccagattacaccaagaggctgagatgtctgggtccattttatgattagaaaaaaaaatcctgttcctttcagaaatagtgtgcactatttgggattctttagaaacttccttggagaaaattaatgattcaagattgagaaaacatttatacaacctcaggccacactcttctctctcttgttattaaccattgcaccactgcaatgttggctgctttgaaaatctcatagtttttggacagcagtattagtaaagtgtaagaaaattgtcaaagcttggagctatgcttgttgaacttttgtaccaatagcacctttaccagaggctgcgtgtttaaagcccgaagaaaactttgcttttctgaaagaatacacacacacacgcatatgtaaatattcatacatttatgtatatatacatattataatacctataagttaggtataacttatatttgtatatgatatatggcctaggaaattaaggcttattaaataaaatttataaatgcagatgagtcaaatacaaagatcagacataactctatcacctaagtaatcattgtttacgttttgcagtttatcttccatttctcccctctaatatgactcttttaaatttagttacacagaaattggttttgcgctcacgacatgcctaacatcaggcctttatccttaaagaagtttcaacactcttgtgtcacctcatgtgtctacagaaaatgtttgcttttatgccttcacggttatgttttcttagtagtagcaataaataaaatagatgcaaagtgctaattacttggaatacagaagcaaattttaattctattaatgggctggacatagatgggtggggagctgttttctgcttttcccctcttcccctagtcctctgactctggtgataactatagtcaacaagtatccccatccttaaccccttttgcttctctttctctttccttctctcaaccttcctggtgttagttttctctttcctatttctgagtgtttttactccgacacttacaataaaaaagtttgaaatcccaaaaagttgacaaatttctaaaggagacagaaaaagagtcaaacttactttacaaattaatttgagaaatagctgtgggttgcattttttttttttattgtgcatgaccctgttattggccaagaaacttgagcagcctgttttggaaagtccctcgctcagaaatgccagcttgctaattgaagggatgtggatccatgaggctcatttgaattccgaagcctctaagagtccatggatttttattttattgggccccaacaggttttgtcttgcattatttaggacattggccaggcaatcactggacagccagtttgctctcctttacattttgtagaatggttatcttatggtcaaaggaaagggagagggcctttggaaaataaagctgtgtatttacaagcagtcatacagaatagttttgtggggaaaataaagaacagttatttaatttgtaatttaatcatttttcttaaaccaacccaaagagcataaaatggaatatttatttatttttgtagcttaatttgtaatttaataatttttcttaagccaacctaacgaacatattgggctgtttattttcatttttaatgggccatatttacatcacaaaggacttgagaagtcttacaaatacaataaaatgataaaatatgaattaagacattagcaaccaggatggaaaaacacaaatttgtaaatgatggccaggtttgcaagcaaaaattaaattgataaatggcagcacccccactaccagctatagttagactgatgaaaaatcctctaatgttcatgcctgaaatacagttaccacccttagcagcaaattagaggcaaagaagttctggaatttggacgttgtctctgagtaagctctttgagacactggacaagtaatttccttctgaatactcttatactgacacataggagaagtgtcagtgtttcaaaggaatctctttgaaggctactacattgctttaggggtgccagattaccagagtaaactgccagtttgagagaataactgtttcttaagagatggtctgaaacctaagtaaggaaatccccccacttgaaagcccctaggaagttaattgcttttggcaaattatcttgggccccaaaagtcccttgatgagcacatgttttgtaataggtactaaagactatttacttatgatgaaaaataaaataacacaatttaaaacttgaaattgataaaaagcaacttgaaaccaaatttaggacagtgaacccatccctttcttatttttaaataggtaaatatagaaaaaatgaccacatgatgtgaaacaaaaagcaaatatttaaaaactacatttatactttatctcaccacactaatgtaaagaattttgattttacttataaattcttagccttgtctacacatatacataattgcatgtttaatttgagctatatatagtctgttttttgttcctttgcatgttacacaaacctttttctatttctacataatttttatctcatattttttattggatacattatagagagagcatttattaaatgagctgggattactataatttttattatttattttttaatttattacttatttttataatttactattgaaaaaaagcatttcttaaatgtactgggatacatatatatatatgactttttcttgttactaaaaaattactcatagaacttacatattaaaattttaggacttgtgatgaaaaataataaaataattcaaaacgataaaaagcaacataattttatatgttgtaccttgtacttccttataaggtacaacactacaatagccttagtgtgtagttttctttttgctatgtatgtatatatatattcataaaagtggaaaaataacatttaataaatcctctttattttctggaaaatccttgctttaaaaaaagtctttagctttttatatagttctacttctaacaccaattaaatatcttcaattcagtctcaagcaggaacaaatcttcagtccacttgcctacctttactgtctttgaagtgacagtgtgagtagtaaagcccaaatcagagagaaattgacttttgtaagattggtaacttcaccttccccggaaggaaatgaggtggttcttccctttgatcacaactgctttcttgatttgaaataaactgttgtacagcccagtcaccccatctttagacatttagaaatggcaatcatagttatataggacaactagcctgagtcccactaagtagaaatgatagtgaatttagtataagattatacctttaggctgggcaggtgactcacacctgtcacccagcacttcaggaggccaaggtgggtggatcatggatcacttgagattaggagtttgagaccagcctggccaacatggcaaaaacccaactctactgaaaatacacaaattagctgggtgtggtggcgtgcctgttatctcagctactcgggaggtcgcggcaggagaatcactggaacctgggaggtggaagttgcagtgagccaagatcatgccactgcactccaggctgggcgacagagtgagactccgtctacaaagaaaacaaagaaacaaaaaatcatacctttagagcaaggccagccttgtgaattagcaaatctgactacaaattcaatcagcagatgtactcagcccagcaaagtgagcaagcttactataggttgtgttaaggcatggactgggataaactggcaaaattagagtaaatttgacaatttgacattggattcattaatgatagcctgtccttcaatgaagtcaggcagcattgtgtttctattcacctctgtgttttgtgaggctataaaaatataagatatgagaaatgtgaatactttttatttgtgagggcagatatcttgaaaaagagagcgagaggaagtcagagtatgcgggtgaagactcttgtttttttgctgaggatttagctttggtttttagccattctcacagagatcattggtcctaattaactggttgttgttgttttttttcatgtgaatgtctgtaaggtttcaggcttgattttaaaaattgggcctatactcacagaaagacaaatactgcatgatctcgtttatatgtggaatctaaaagttttgaatccataaaagtagagagtagaatagtggttaccagaggctagttgggggcaaagttgggggatttagggagatattggtcaaaggatacaaaatttcagttaggaggaataagttcaagagatctagtgtacaacttgatgtctatagctaataacaatgtattgtatacttgaaaattactaagagtagattttaagtgttctcgccacacacacacaaaagaaaatgataagtatgtgaaggaatgcccaatgtaattagctcgatttagctaattatcttccaaaatatgtacataattatcttccaaaatatgtacataattcaagacatcatgttatataccataaatatatataatttttttatttgtcgaataaaaataatacaaaaaaaccctgggcctatactgcccacaggtagtggccacaggcagagctggtcccaagcccctccctctctctgtagtcccttatcccaggttgctttattcttgtatgacccacgtggcccctctgggcttgtaagggctctggggctgtattttaggactctatagcccttacattacccatttcctctaccaaaggtcatttctcttatcttcaagcttatttttggaagggtcattatttcttcatgagaagtcaaattctgatttgcaagtgctgaacacagatgccattagtctataaaactcttatattctcacatgtaaatgtagtaacctgctaacctcagattctgcttcctctaacctagttgccctgcaactgtgatgaacctcaaaatcaccaagggtacttccccattctcagagatcctgattccttaggtctatgtaggggccttagcactttttattaaataatgcatcactacaggattctgatgtctgtcggggtcttgagaactatttttctgactctagcactaaactcaaaatgtaatttcagatggaatttcctaggctcattcattttattttatttatggcttggccagtcatggatctaatcagtaacttgcaactgttgcttcaactacctctgtcctggactttccagagattggctttaagaaagaaagaggacatccctgggataagattaccatgtgtatttttatgtacagattttgaaaaacatacaaatgaatgggatctttgcttatctcttccatgtagaaaaatttattttacttctatttcaggttttcaataatgtagtaggacaagatgacatcactatatccctgttttttacacagatatattagagatgcattatcttattggaaattttaaactattcaataataaactattagtcttttagaatttctttttcctcaagtgttgataagtaactgaaagtctacaagcagacaagcagaattagtcggtggaacttcatttcttgctccatttttgtcctcagcagtagagggtggtgagatttcaacccagcctagcaggaccaataagtctggaaagaagtagctctagttcatattggcacctgctaattctagttctgaagaccatgggaaatctcttgcctatttagctcagtgatcatccaagatgggaaattcttgggctcagctgtgagggatcccaagtttatatgtaacactaatgtctcacaaatcaagaatccaagagaatcaagagactatagttcattccttatattaaattcttaggactgccaactgggtggctacagttttgggggctagaagtctgatatcaaggtgccaactggactggttccttctgaggaccacgagggcaggatctgttcaggcttgtagatggccttcttttccatgtgtcttcacattatcttcctctgtttgtatgtgtgtccaaatttcctcttctttttttttaatttagaaatttatactgtctacaagctttatatagctttagttaaaaaaaagcaaaaaaaaaaaaaaatcaaaacaaaaacagtgaagccaagacactcttccaaagtctggacccttccggccttccaaatacaagagctctggaagttgtatataccaaatttcctcttcttaaaatgtcaccagtcacattggattaaggcttaccctattaacaccattttaacttaatcacctctgtaaagaccctatctcctgatacagtcacattcggatgctcaggaagttagggtatcagtatcactatatgaatttgggagttgggggaggacacagtttagcccatgacagtcctgaatctcctttgctagatgcatgactgtgggccagtcacttcaccagttgggatactgccatctctatcagaaaaggggtttgggctaggtcatctataaagtcctttctgctctaaattgtaaatataatgagataccaacatttagtttaattgtttaaaattttagaagctaactggatgctttgctggtgtcaacactcccctttacaaaaaaaaattcggccgggcatggtggctcacgcctgtaatcccaacactttgggaggccgaggcaggcggatcacggggtcgagagattgagaccatctggccaacatggtgaaaccccgtctctactaaaaacacaaaaattagctgggcctggtggtgcacatctgtagtcccagctactcgggaagctgaggcaggagagtcacttgaacccgggaggcggagcttgcagtgagccgagatcgcgccactgcacctccagcctggcaacagagcgagactccgtctcaaaaaaataaataaataaataaaataaaataaaataaaataaaatctcactttctgtttctactgttctctcaagtacccctctgccttctgttacttctttgctgcattctgagaggaatggggtggggagcactctttcctgtagaaccccataacccatctattttcatcaatttatttgaaattcaaagccaggggttaaaatgtccactttcaatttgagatgtctaactttcagataaatctattaacatgcatttctaagtgacttttaagctaagcattttattttattgagctcgtatggaagggtaactattatacttgtataataaagtgcactttcaaaaatactcggttcaaatgtaaaataatattcgtaatattttaagacaaacctcctagaacttatatgtgtctttcttcccagagcagtctctatgggtgcctaaacaatactgcattattagatttttttcagtttataagccacacaagaaagttaacccatgtcatctctagaggcataaaaatagacagttgttctgagaaacatatctgtttattcctagttcagtaacagcgcaatgagatcctaaattatgaggtactttttgtttatcttattgtctcattggcaaccagcaactcctgttgcatttttgacatgggaatctatcagggtgtggttaataaagtacatttccatggtaagtattctttaagaaaaaataaaccaagatttcatcagagacagaaattactgcaaactgtacttaccagtttctggtgatttgtataactgagctttcaatttcaaaaattaaaaagttctctttagtgtaacatatttttgtgtccagtaattttacttcaaaaataaaagagaattttctttaccatcaaacaacgttgctgtaatgagtggtgatatatttagtcctagaggaccaaagagaaataaaatggctttgattatgctggtttaagaaaatatatccgatgaaacagaggttaatatttgtgatgtttgatttagtaaaattataagactaccaaagaaaactagaagagcaaaataaccaaaatttatataaagaattcaatgttgataattcaaaggtttagaattttttccacctttcaaatactaagttgctgttatagatttactaccattattacccagattttctattttactaaaaaataataacacagttcgttatgataaatcagtatagatctttaggctcaacacaaccctgctaccttttaaacttttttattatacaacaaacacatatgcattatcaagaaaagatgagtttagcaaaatgaagaaaaatagtcttatcaactagaaataagcaccattaaaatttctgtgtgttaaaagataatatgctgctgaaactttttttttcttgaaatgtccctcttttctttcacttttcattttcttaatccctaaccttctactgttgaattttctggaccaccgttataccccctcatcaatagggcatttttttctgcagtagctgagcacaatggtcatattgaagaaattcccttgtgggggctttgcctagaggtaaaatcctcttggccgggtgcgttggctcatgcctgtaatcccagcactttgggaagctgaggcgggagcatcttctgaggtcaggagtttgagattagcctggccaacgtggtgaaatgccgtctctactaaaaatacaaaaaattagccgtcatagtgtgcattcctgtaatcccacctactcgggaggctgaggcaggagaattgcttgaatgccggaggcagaggttgtagtgagccaagatctagattgtgccactgtgctccagcctgggtgacagagcaagactccgtctaaaacaaaacaaaacaaaacaacaacaacaaaaacaaagtaaaaccctcttcactgtgatgactctaaagcttgcttttgtctctctaaatcacaacaaaccgtttgcagtgtgatgctgtgctcaaaattgagaattctcactgactgttccaggcatctgtctactcattcttgccatgctgagggctgtcatttctcaccactgaatgcctttttttttttttttgtgcttctttttaaaagtcttttcctgtttgctttgaacttcaataaaaacagggggtaagaaggtaatatgcttttattttgtctgtggggtttttttcttccttcttttggttccttttcagatcctagctcatcaaggccatttgccacactgacactggaataagcctgaatgggggtctatatttcttccagtagttagtttaattcggtcattgagctgttgctctatttgtaaccgtcatgctagatccgagggctgactattcctgagaaagtgtggagatcctttcagactgccatggtgctagggcagagtttcagtcattatcttctgtgtctgctaattcttgcatcatttcttctactctgtaacctggttggctatgaaaagtgattcttcctcactgatgctgcaggcaatgggtgaatatccaattgttctctcaggttcttgtcatcggatacaaagaacaaatttcatgtgtccctgtttctgagaggttcaaagggagcaaatgcacagattctagcttaggatgacttccagcttctaactatttgtctgtgcattccatttcctcacccctgcgagaggttgcagtcatggtaacggctgttctgagaaattcagtgcccaaactggagggaggggaacacaaactcagcttcttcccaagcttcagggcagggctggcaagttttgccttccccgccagcaagagccctggctttaggggtcttgctacagttttcccagactggaggtcttggggctggattctggttcttagcgaattcttgccaaacacctcccctttccccagtatccatttgttttgaaggttctttgcaggcttcttgccaataattgtcttaaaacaaatggagttgtttgcatacctagatggagtaaaatatttaggaaactattctacaaatatgaaacagcccagatttgggccagaagtcctggtcctgagtctcttgttagccactcttaactgtgaattattggacaaatcatttctcgcactctgtgtaatctgtcacctgggtacttgatgatttaaaccaggaattgtggcccttctcataatactgtctcctaaatattgggtgaatttagtatatcaaggagggcagggcactatacccgtaggggactctctctctccctctgtctctttgcctttctcagatatgcatctttggtggcagacctggggttcaaaccacagttgttttgaaatttctctttccttctccactatgctccccctcactgaaactttaataataaaagtagcacacttattgggcatgtatttgttatgtgccaggttctgtgctaacagctttaagtgcattattccacgtattttcacaacaagcctgtgaggaagaggttatttccacttatagataaagaaactgagacttggagaatgtaagtgattttacccacaaacacagggcagtaagtgggaggccctgttcaccttagaacacctggcttctatcattcatggtgctgtttctagtgtggtttgaagaacctgagatccaaactgctatacaagtgacctgctgctttcttggagagagaaatctgaaagacagtggagccctcacattgtctttgcctgtgcacagcagatactgccaattttgggtgggttacacttgtttaccacgttgcttacttcagaaatcaataaaattctcttcatgcttttattttacaggttcttacgtctgttgctagattatcgtccaaaagtgttaatgcccaagtgactgacatcaactccaagggattggaattgaggaagactgttactacagttgagactcagaacttggaaggcctgcatcatgatggccaattctgccataagccctgtcctccaggtatgttacacaaaacatccagagattacagtgaaagtcacagttaggagtagcacatagtaatcatgactataataattttacagtttttggttcccctatattatataacataactgagagaaaaacaactatgaaattattttccaaagatgagttttatttatatttatcacgcttatttgatgtggttatggataaatttaatttacaagtgacatgcacctctgaaatgagaagactggtctatttggctccatttttttctaagcaaaaatgactcatttgtgaatatgaaagcttatcatgtcaaaactgattaggatctaccataacaatagtggaactctgaaagcaagagacttctcctcttaagggatatgtctcagcacttcccttcaatcagaaggtctctaagaaagctgtcctggcactgaagcctgcaaaatatatttgcattttgcagctgaataactagacgaataagaaaagcaacaggcagaaaccaacagcttttttttttaaatcaatactttgaagggcaaactaatttcagatcacaaatccttcaaacactggtaaattagaagctaagcaaaatgcaattgtgcaaacatttcttcaactttgagtagagttgaaaaaaggaaaatagcacatgggttcatgtgatagattaatagaacaaaaaaggactgtagtatgtttcatggttgtcctcccaggcttccagcactcaagctgtaaaacaggatgggtcctgtttgtgaaaagattctaccagtctccctgtgcttcatgtccagattttaataaccgttatggaaaaatctcccctataacccaacccatttatacttaaacccatttacacttaaatcttctccaacacgaataaagaatggcgtcctggctttattataacctgctaaacacaatcaatttgctctatgaattgaaatctttgttcataattttaaaacctaaaatgtaaattaaaatgaacaaaatatgctttgcacatcaaactgtcaaggatttttgtctattgctttttcggttttgctttgttttattttaatttaagaagtgaatgtaaattgttacaaacttttaagaaatacatttggatatatgagtcaaaaatttgaaaaaaaattttttttaacttttttttcttattattatactttaagttttagggtacacatgcacaatctgcaggttagttacatatgtatacatgtgccatgctggtgcactgcacccactaactcgtcatctagcattaggtatatctcccaatgctatccctcccccctccccccaacccactgtttatacttgctaagatagcaattaatttatacgaaaataccctgagaaaataatcaaaaataaaggaaaatattgtacacatgatatttcattatcaatatgatgtaggattccttaggtaaattctggaatatttaaagactgaaatagtatgtatcaaagtcatgttttctgatatatttctaatataatcctcaattatataaaccttcttaagtaatttccaactgatctggctggattaactgattctccctgatccgtctataaaatatcctggatggcatccaaccatgttaaatactcttcccacttcaattccctcttgttgaattttaggcttatcaatatctaagttgcttccaaatctgtttatgctcattagtgttgtgatattcatatgtaatttgattgaatattgcataaattaatgaaatacaaatacagagaaaagacagattttatttctaagaaaactaggttgagtgctttggagaattcaataaagatgagctgctaaaatgttgttgatgaattttgtgagggaaaaataaaagttaagtagtaggaaaaatcacaaaaatctctaaagccattcatagagattattggtatgtttatgttttcctttcatcaaaaacgaagggagggagggagggagggagggaggagaaaaaaagaaagaaatgaaaaaggaagagaaaaatagacaaacaggaaattataggtgatgcattatggatgtgacttaagaaagaacctgggattataataacttctatatcacaaaattgtcaaatgattatatagttatattttataaattaaaacaaaatatttacagtatttttaagtgatttcctatgtaaattgacatttttgattaaatgatcaaagaagtcctccccacatcatcatattcaataagaaggattctatggtatactgcacacatatttcatatatacacattgtacatatatatatatacacacctgttatatatatgctcatgcatatacatgtatgtatgtattatatgcataggaatgcaacaaaataacggcaatatctccagattgttgatatatagttttttgtttgtttgtttgtctgtttttttgagatggagtctcactctgtagtccaggctgaagtgcagtggcatgatctcagctcactgcaacctctgccttctgggttcaagcaattctgcagcctcagcctcccaagtagctgggactacaggagcacaccacaacaccgggataattttttgtgtttttaatagaggcggggtttcaccatgttggtcagtctggtctcaaactcctgacctcaggtgatctgcctgccttggcctcccaatctgctgggattacagacatgacccactgtgcccggcctgatacataagttcttattatactttcctgccttttccaacatttctataataagcatatgtaccattatactaaaaaaagtattttaaaatctgattttcaataaaacaactacttattttcttattttaataaattttgttttcatactttggaggaacgaaagaacctgtggtttactgtatctccattataccaaggaagttgtgctaggcacattctgtaagataattcattaaagagaccaattcattcagagaccagtataataccactagcaaaaaataaaattatacttggacttgggttctgttttctttaaatattgctacaatgttatatagccctatgcactatttttgaattttgttctgggaatctccagtttgttttttactattgacagactattatctttacttactaaaatagcatatatatttacatgtcataatttgctcatgtagtaaatattttgttttatcaaaaagaatatatgaagttattaaggaattcatgttcctaggaaacacagcagaaattaattttgctgtataggtgagcagagcagattaaactgcttatatttttaaaactagttataccattaacaattagagtcactagtaatgtttttctcacacttcccttgatattttctgtcactttcttcttaattctctattcccttaccttcatctagctttccccatagcatttttttagcacttgatatcaatatatttatttgtgtattgtctgcctgcatcccaagaaggtgaagtctttggtgatgaagggtttatcttatttcctgcataatatcaaacttctaaaaagttcctaggactcaataggcatttaataaacacctatcagataaatgaattttttaagagaacacattacataatgctttctaatagcaatacagtgacaaactttatttttaagtaaattaatgcaaatatgtatattatttaaaattgtttgtttttaagataacaagcctgatagataataaattttggcataaatatgttaatgcttatcaaaactcatcagtacatatcctgtcttttgatgaaaaagtaatagaaaggggagaacaaagagaactctcatgctcactaggcaggccgagtgcagctctgacagcaatgcaagagaaatattactatctccatcatatgcaggatgaaatttaggcttggagaaaacaacacttcgttaaagattttatagctgctcaagatttgaccaaggcttttaaaacttcaaatgttcttttccttattacactgtttcttatcaggatttgtggactttggaaagtaaaatgaaaagtcagagcaatgtgagttagtttgataatctcagtggccagtaacagctatccccactctgaatatataccaaccaacctctcccctttctccaaggaagttagttcttggcaaaggcatttcatgcagtgtactttgtcattctaaccttcctttttttttgtatgctcctgttgctaatcatcctatttctatgggcttcagtcactcttttagcttttgtcttgggagactttctgtctgttgacatgacttttaaaataatcttctcccccattgtatttatatctcattagcctaccccccctccccttgtgttttagaagagttttattgtctgtcatccctctatagttcccaccctgttacctgcccgtgtcctgttcaaacacttgctccttttttccttgggcaggtgaaaggaaagctagggactgcacagtcaatggggatgaaccagactgcgtgccctgccaagaagggaaggagtacacagacaaagcccatttttcttccaaatgcagaagatgtagattgtgtgatgaaggacatggtaagagtcttaaaatgcaattgaaagaggccaatcttggaatttcatgtagaaccatttataagacaatttgaaattggggcctactgtggtgctatgttgacacacaggaaagggaaggacaggtggctagggtaccgcagaaccaggtgccgagctaactactggtctagacctttatgagtaagtctaggcaattcttccagatataggagaatgagtaaatatgaaccctaggaacagggttcatcagctcaaatcaaaagctcagaaattattttttttctggccttgacttacgcttatataatggtgctcgttcatggccagaaaaattcagaagcctgcagatacaaggacacagaaatccaaaaggtaggtaggaatgctccccctttctttggggatttagtttgtcctgataattccatctggggacctgaattttcatggatatctcaatgtattctaaggacccagattgaagtataacagaagtgtttctagttttgtttgacatgaagaaacctctggacataaagcttttcccatccctattcagcctataaagcaatgtttctcatccctggcagtgcattagaattgcttagggagctactaaaaatgtttcatgtttaggtcccatctcagggcaattacatcagagtctctgagtgaggaccttggtattggcctgatggagtaagtctggggtagagcctaacattctacatttttaacaagctcccaggtgatgctcatgctgccagtccccaggtcaccctttgagtgttaaggctagagactagaggaacaggggagacgtctaagtattggtgaggtttgtcttggttgctgctaaatgattgctggccatttcaacctggggtttcctgttctgtgtttaaacactgactgtattactggtgtcatgctgtgactgttgatataagcagtggatctcaaaaatccatgcagctcctgcccaccattttcatagtctgcttataattagccgctataactaatagtttccaaactgattttctaggcttagaagtggaaataaactgcacccggacccagaataccaagtgcagatgtaaaccaaactttttttgtaactctactgtatgtgaacactgtgacccttgcaccaagtaagttttagtctttctctgattaaaacactagatataacatgagagttatcattttcctagggaagtaacactgactgagagttaagaattagggttctagtcctgctttgcctccaagcaactagatgactgtttgctcatttaaacactggtgaacttcctgtgtaggtgacactttgctggccacttaagctaaagatatgagccagacatatgcctggcatcaaggtatcagtccagaagcacagacagtcaaggaaagcaatggttattgtgtttcaacagcatgagaatagcatcagaagagacttatgttccaggtgttacaaattatacagaaaaacttttcaactctgcctgaggagatggaggtgaagacatgaatgtgtctcatgacttgaatcttgaagaaagaaaagaaagagcattaacaggtgcacatggatggaatgcacattataggcagggaaacagcagctgcaaagagacaaaggaagctcaggaaaacagaatacctggctggagtgtaggaaagactgagaagcgttcagggctgaatcatgaagggccttgtcttttaggctaaagaggttggttttgacccaaagttagagaacctgccttgtaagtcatcttgggaagcttttaggagttcatctaataggcttaagaaataagcacatgatgccttatgttttatttgctaggaaaattttatgtacagttgtcccaggctctcccctggccacaagtgtctgagagtgcccctatgatgacaggctaggtaggcattggggaagcagctgacttagtaaaataataacaataatagtaattccaaatatttcataatcttgatttaattttcttgtcatcataaccttttgaaatagataatattatttccatgttattgatgagataaaaggctcatggcagtgtgacttcccaagctcacctagtcaggtaatgggcagaggctgtgaactcagacaacctgattgtgaatgtttgtctgtctgaaggaaatcacacatgaacctcttgagtctcctgatcaccaccggttgctaaaagtggcagcctctaagggccagctgagtaccctccctgagctacatcatgggcgtggctatcacctggccattttcttggtctataggaattttttgaaattacttttgacagtttattttaagagctagtttaagctataggatttacgtgttcagtttattactaggtttaagtttatttttgtatccacttcatctctcttgtgtgtcactattttcctatcttcctttaactcttgaaatcttaagacagagtcattccttatgatatttttcatccagccatccaaattatattaacttgtgccagctttagatactaatttagaaatatttgaaggaatacgtttgccagagatgcaaagatgaataaaatggcccctaatttacaaagtgccattgaaaattataaaggaattattctgccaggcttttgaatttctcctgtatttttttttctagatgtgaacatggaatcatcaaggaatgcacactcaccagcaacaccaagtgcaaagaggaaggtaattatttttttacggttatattctcctttcccccaaccccatggaaagatgtgaagaaaaaccaatcactcttgattactagaaagtcctttatttaatcttaaagattgcttattttcatataaaatgtccaatgttccaacctacaggatccagatctaacttggggtggctttgtcttcttcttttgccaattccactaattgtttggggtaagttcttgctttgttcaaactgcagattgaaataacttgggaagtagttcacaaagatttgcctcattcttacctataaaaagctaccactttggtagatttatgtattgttaatttcttgcccctgaatgcagccttgagagctgactgataagaacaaatgaaattattcctcagctagtttctgagcaacagttttggggcattgagtggtattctcatccttcctatgaacaggtgttctctgcagcagcagaattggccaaaaatcagaagcaattcttcactattcattgagatctccctatgcaaaaagagaacacaagaagcaaaggcattcccaggaaacacattgcagggaacactttaaaaacttgtacttcactgcctcctcttcctcggcctaattgcttgtttttaattatttctccttcttaacttaaaatactatggggacacatgttatacaaaggtgacttagtagagtcagtagaaaagccaaaattagatattatcataattagtctagaaaaatccctttaagtcattcatcaactacagggtcacaccaactttcagtaacttagaagtattcaattttcccttctcagaacaattatctgtttcttcagttcagttgaagaagaaagtttgccttgcctttagcggttgtttagctgaaaatacatttgggatatttaagcactgtaattgtgctcagagacatacagattcttctatctcacattgactttaatgcatacacctattgagtatgtatgcttgagttatttgtgtgtgtatttcatttctgggcatccatagcaagttgatgttgacttgcttgtcctacggcttctgcatcctgccatagtcttgccgtccacatctttgctggacagagagtggtgcttgccatatggtaagtcaaaagccatctccttgctaggccagcctgtggtaattagatgactaattaagatatgtcctttcactagaacacttgacttagtagtacgaaagttccaaaatcagcggtctcctgcgatgtttggccacttttaagtttcactgaatttctcctttttccttcttatatttctcttagtgtgaaagtatgttctcacatgcattctacaaggctgagacctgagttgataaaatttctttgttctttcagtgaagagaaaggaagtacagaaaacatgcagaaagcacagaaaggaaaaccaaggttctcatgaatctccaactttaaatcctgtaggtattgaaataggtatcagctttccttgaaaagaaaaatagagaaattagtgatttggctttttgttacttccttttacttttttgtttcttgtttgtttcattttgtttgagatggagtcttgctccatagcccaggctggagtgcaggggtgcaatcatggctcactgcagcctcaaagtcctgggctcaagtgatcctcctgcctcaactgtgaccctgggactacaggcatgcaccaccatgccaggttaattttttatttttattttttatagagacagggttcactttgttgcccaggctggtctcaaacttttgacctcaagcaatccttctgcctcagcctcccaaagttctgggattataggtgtgagccatcacatccggcctgttactttctttatttaaacattgcttgtgtttgtgggtgcataggttaaaggggcctcacagatgaattatgatatggtacccaaattaaaagtaaacttgtacacaaaaaccgtaagaatcaacaaaggagggaattgagagtgtgctgaaaatgagctgaaaaaagaacttggccaacctccatgttccgtgttgttgttatccctgcagagaaacagcctttaccaggcatgggttcagtatccaagcctgagcaaagagattgctcttaaagtttgtcataagggcacagcttaactttctctggctgccggttgaccttatgtctcaccatatcttttcccaacatggtatcaatatatttcagatagcaagaaatacaccgagaaaagaaaccagttgcacttaatggaattattttcttatttggggccagggctcagtgggagttaggattctttaaattaatatggtaaaaaaaatttcaatttgagccattttctggtattaagaataagaatagttacagggaagaaaattttagagtagttatatttattatttattttaataagtctatatgaaaaataacctcaacctattttatgaattctttaggtttcttgcctttaaaaactaagacaatattgcttagtttctggcaaggccggaacctttcagaataaaaattgaatggtaaaagtaaccttcttaatcacttaatctagcttcctaattttatacatcaagcaactgattgtacttctttctgaattaaggaaaaattagaagttcacatttagaatattctaaagatatatttttatttgtctttctctgcttccattttttgctttctaggaaacagtggcaataaatttatctggtaaggcttttatcattttatttcatagagatggcatcctttagagtaataggccaatttcagagtaaaataatgttactaatttcagtgacatattatgggatcttgttatttctcatacaattctacctgctcagcataaagcatttatcaggcagtttgtttaaatttataatgaatactcatagttaaaaataatcaagtaacaataagacacaatagtctgaggcttaagaaacttttccttcataatcagctagatgtattacagaactcctgcctaaaaagatctagaggttaaagtgtactgtagactcaggtattatcagtgtacccaactctataacaacatacatgattccattcagttgttctttgatctgtgatttagagataagatgatcataaactctttgcttatacttttagatttgtgggtcattgatcattggatccataagagatgttataggtgatcttttccaatcctcttaatttataaatgagaaaagaagatacagaaatgttatgtattgtggcccaggttatttaacaaattactgggtatatggcaggatttggagttagaactcaaggttgtcttgtttctgtattcccctagtcagctcttcatagacctttaggacttagctatattctgaagtactataaaaagagaaataaacatggttttcactaatgggaatttcatttagaaaaacaaattttcagactattttctatttttcagatgttgacttgagtaaatatatcaccactattgctggagtcatgacactaagtcaagttaaaggctttgttcgaaagaatggtgtcaatgaagccaaaatagatgagatcaagaatgacaatgtccaagacacagcagaacagaaagttcaactgcttcgtaattggcatcaacttcatggaaagaaagaagcgtatgacacattgattaaagatctcaaaaaagccaatctttgtactcttgcagagaaaattcagactatcatcctcaaggacattactagtgactcagaaaattcaaacttcagaaatgaaatccaaagcttggtctagagtgaaaaacaacaaattcagttctgagtatatgcaattagtgtttgaaaagattcttaatagctggctgtaaatactgcttggttttttactgggtacattttatcatttattagcgctgaagagccaacatatttgtagatttttaatatctcatgattctgcctccaaggatgtttaaaatctagttgggaaaacaaacttcatcaagagtaaatgcagtggcatgctaagtacccaaataggagtgtatgcagaggatgaaagattaagattatgctctggcatctaacatatgattctgtagtatgaatgtaatcagtgtatgttagtacaaatgtctatccacaggctaaccccactctatgaatcaatagaagaagctatgaccttttgctgaaatatcagttactgaacaggcaggccactttgcctctaaattacctctgataattctagagattttaccatatttctaaactttgtttataactctgagaagatcatatttatgtaaagtatatgtatttgagtgcagaatttaaataaggctctacctcaaagacctttgcacagtttattggtgtcatattatacaatatttcaattgtgaattcacatagaaaacattaaattataatgtttgactattatatatgtgtatgcattttactggctcaaaactacctacttctttctcaggcatcaaaagcattttgagcaggagagtattactagagctttgccacctctccatttttgccttggtgctcatcttaatggcctaatgcacccccaaacatggaaatatcaccaaaaaatacttaatagtccaccaaaaggcaagactgcccttagaaattctagcctggtttggagatactaactgctctcagagaaagtagctttgtgacatgtcatgaacccatgtttgcaatcaaagatgataaaatagattcttatttttcccccacccccgaaaatgttcaataatgtcccatgtaaaacctgctacaaatggcagcttatacatagcaatggtaaaatcatcatctggatttaggaattgctcttgtcatacccccaagtttctaagatttaagattctccttactactatcctacgtttaaatatctttgaaagtttgtattaaatgtgaattttaagaaataatatttatatttctgtaaatgtaaactgtgaagatagttataaactgaagcagatacctggaaccacctaaagaacttccatttatggaggatttttttgccccttgtgtttggaattataaaatataggtaaaagtacgtaattaaataatgtttttggta

SEQ ID NO: 27 - DNA, 35417 bp, Homo sapiens
gcctttctggggcctgggggatcctcttgcactggtgggtggagagaagcgcctgcagccaaccagggtcaggctgtgctcacagtttcctctggcggcatgtaaaggctccacaaaggagttgggagttcaaatgaggctgctgcggacggcctgaggatggaccccaagccctggacctgccgagcgtggcactgaggcagcggctgacgctactgtgagggaaagaaggttgtgagcagccccgcaggacccctggccagccctggccccagcctctgccggagccctctgtggaggcagagccagtggagcccagtgaggcagggctgcttggcagccaccggcctgcaactcaggaacccctccagaggccatggacaggctgccccgctgacggccagggtgaagcatgtgaggagccgccccggagccaagcaggagggaagaggtaaggggccagctctgcggccatgagaggcaggggcgagaggcagccgctggccccgtggctagggcttccagaaccctgaccctccagctgggggtgtgtgctgctggatctcagagggtcactccctgctatcgcttggagccaaacgaggcatgtccggggcagaacctgtggacatttggtggtgtttgggggcacatgatcatgggctggcatctcgaggacttcatgagtaagcctcactctcctcttttggacaaagagcctttggggtgccggccggcagctcccggcacggcagagcagctgggagtgtgcgtgtgtgtaggtgtgtgcttagagggcagcgtactgaagagctgcagaaggcaggggtggcccaaggacttgggtagtcactttgaagctttggattcctatgcccccaggccgggacaatgtgaggcaaaggcaagcgctgtgctgaggcgctgggagcccctgctcggagagttacaggagctgggctgcctctgctcacaccctccagctggcgaggagagcagaggcacccagcacgggaacggacgcatcacccaggggctgctgcactggatggtaccccgggtctccaactgagtggatgtggccaagatacagggaggatgcggcttccctggtacccccgcaaggggacagcaggggctccacataccaagtcgcctgaaagcactcagtattagataacatttccaaacaaattcttcactgatccttcccttctccttctatgatatgtgtgtcatgggtcagctcttgcctctgctgtaggattatgagagctcccagaggccagttcagttacttggaaaagcatctcctttcaccccactctctggggaaaattgagaatgccacttccaaagccggccaaatgctccccacatgtatttttccaaatggaggcagagtagggcagtcctcatgagctggcttcaaatcccagctcttctacctactagccaatggctctggcagaacacttagcctttctaaacctcagttttcttatctgtgaaatgggataatactgcccaggtggtaacaatggccagagagtaacagctaacacttatattgcacttactctatgccagactcaacttgtagaatcctcatgaccaccctatagcacaggcattattattcatccctgttttataggtgaggaaactgaggtaaagtaatgtgcccatggctacatggctagtaagtgccaggaccaggacttgaacccagtggtgtggctccggagccactcaaccacaccctactgctttctaggagaaagctaggcgcccatgcctaggaaggccttggcttagtgcctggtgcacagcaaaccctgagcaaaccttggtcactgatgattacaaaccacaacaatcaggactggcacagagggaagggaagagcagagacacgaattctttttttttttttttgagatggagtctcgctctgtcacccaggctggagtgcagtggcatgatctcggctcactgcaaactccgcctgctgggttcacgccattctcctgcctcagcctcccgagtagctggggctacaggtgcccaccaccacgcccagctaattttgtgtgtgtgtattttcagtagagacgggtttcaccacgttagccaggatggtctcgatctcctgacctcgtgatccgcccacctcggcctcccgaagtgctgggattgcaggcgtgagccactgcacccggccagagacccaaattctttccctgttctggacatatcctgctagggttttcagaaaatcccacgagacagagataatactgtggctactatcactgcccacactggagggctttccaggagcctgaggagaggggggctttatgtctggggtttgggtttggggccacctgcagcatgcctgcatcctagaagtccatactaagaaaaagtgcagacatattaacaaaaggatctaataccaaccttacaggaggaagggcatcctgcttcccacatgggcactgcctgtctgcctattgatctccccagcagaaccatagtggataagaaaatgcagctaccttagtgctgtgggaagctcacaaaatcaggaggatccatagtcaggtttgccccggagttgcagaggaagaggcaaggaatggccatcaccaagtctggcactatggtggccatgtctggtggatcttacaccagacaacactgatacatcttagcccaggagaggagcttctgtgctgtggccccctgaggttccagtgggctccctgcacgcttggaagcattttgaaaaggtgacatcaagtatttgcttctctagcacaaggcctctggggctactgaagccacaggtttccctgctccagcctggaaccatggtggctcactgtcttctctgggcagcttaggatgagcagaggctctgactgacttcatgagcttggcaaaaaaaatgggactacttactactaatgaggcagtctgggtggaacagacaaaaatgtgtaacgcacatggtccagcaggggactacatgttattgctgaagctcacgggcagagcaaataagctgttcctccatctggccctccatcccccagtgatttaggaagtacccactgggctaaataaggcatatacattatgtcatttcatcctcaccacaaccctagaaggtaggttctagttttagcatcccattttacagatgggaaaactaagtctcgagaggttaacttgcccaaagtcacacagttatgtgattatgtgggactggaacccagctctgtctggctccaaagcccctgacttcctctcacttcagtgccttgtttagacacctcaacttctcttatcctgactgtcactgggtccctgcccagtgtcgtcagtagccacatctgctttggttgctgtcctatcgaatgctgcaccaacccctctgaaaaccatggacttactcaactttagcgcatcccttgctcttcatggaagcctacttctgaggcaaaataggcatgactgttactcttagagatgagcctcagcacagttatgagggtacctgttatgtggtaatatggtcagtgacaagaggaactgagcttcgaaaccaggttggctgacttgttccacgtgcctgggtgctctgcgatactgtctcaccacatcagcaccaggaaactctgtccccagctcagtgggggcagagcctcagggaaacactggtccatgtgactaagatactattgatgcgctttctacatccgtacttggaggctcctttaggactgaagaatcagagctcaggtcctcatcacccacactgggccacacacgagcaatttctgagaaaacatcagggagatggcaatgggtagctacaatagaacaaacataacagacagcagccctgccaaagcaggtacattcagcaactggcctctctgaatcacagcccatttaatctggaatggtctcaactgacagcaggcagatgggggaggggctctgcttcatagagcccacagcccagcaggactgggcagacagtaaataatcacacaaacacacaactgtgtgaaagctgtaaagaggtggcacaaggagctaagagggtcctcaaggtgggtggtgctgtccccgtcttacagaagtggaaactgggggtcagggtgcagcacctctcccacggtctctccatgcatgggccaaaaagcaaagattgaaacccagacctgtgctggttccaccccagcctgctgccatcctggacaaccacactgtggaaatctcaagaaagaatcaattcattgaatagcatttcttttttgtgaatttatataaaacaccccaaatagaagagttattcagccacaggcagcttggagtttgtggtgatacactggtcacgtcagaagcctcattctgggggtagtttctatgacaaaactgtgttctttcacatggactgtgagccatatgactgagttcataacagtgttgggggttacaacgttacgatggcctgtcacatgtacacatcaatcacaagccacattttggtcccaggaatgttaaaatgttgggtgtggcaggagaatcccttgaacccgggaggcggaggttgcagtgagctgagatcgcgccactgcactccagtctggtgatagagcaagactccatctcaaaaataaaaaataaaatgttgggtgtggggagccaggcctctcacaactgaactattgtgtcagtccattctctgctgaaatcagcctgtctggggccagcagccccagagcctcagcaaccccctgctgcctagttgtccagacaggcagtaccaagaccaccaaggaaaagcccagaatggactctgttcttatcttcaagagatgcctgaggacctgcccagctccaagaatccttaaagtcctgcctgaggtggtcccactccaacctccatgagggaaaggctgtgtctgtctcagttactgccgaatctctaatacccactcagggccaggtagaaaagatatctgtggaatgaatgaatcaatgaagcaagcctcaggcccaggctctcaagcaaacaagcttctctaccccagggtgccacaccattcctctctctgttgtccagccaagggcttttctgaggctaggtcaggtgccccacagccccccaagtttccctatctgggcatggatctctttgcattacaaatgcctagtctctgtctcacctactaccgtggaccccttgagggtaaggacctcacccaccttgttcctgttctacctccagccgctggcacagtggctggaagaggagaacttattgggaaatacattatacaaatgaagttcttgaattcctatttagtaacctaggtgccatcctggatactcagtagtcagaggaggaatctgccctggccctgctttttaaagaagctgtagtcaggagggagataaccagatgactgcaatctgagtcttgggtgttgagttggaagcagccacagctgcacttgtgagctgaaggagggagggaagacctcactgaatggatggcttcatggtgaggtcaacttaggaagacaggcaggcatcagccaggacagtgggggaaggtactcgaggcaggaagcacagcacatgcaaaggcagggaggcatgacaacacaaggtctgtttttaagcaggacgctgacatgatcagatgtgggtgtcagacagacagccctggagctgcatgcagtgtagactgcaggggagagagcacccaaaggcagggaggccaattaggattgtgtgggtaagaaacctggccctgggttagacaaatctgttactgggcccagctccaccacttggtagcactgtgcccctggacaagtggcttcatcccttacctttgtttgctcatctgtgaaatgaggatagtcatagcccctgcctcaaagagctaccgggatcagtgaggcagacacaaacattggttgtcccagtgtttgaggaacaagtccatccaaacagccaaggtggccctggtgccaacttctcagcctggtccagaaaagcagccccaggcaaggcctggacttcccaagaaagtcaccctggggcagtgctgtccacccagcccttgacttctccctcttgtctagggctttcccagttgtagggctccagagcacactaggcactgccggaaatgcagcagccaactcagaagctggactctgaaatggcttctgcagactcttccccgcctctgctctgttggccaaggctcctggcacagaggcctcagtgcacagactttgggggaatctcaaaatggttcccaaataacgcactgtgaaaaagtaacagcagtgtccttgtcccccggaaaaggcaaccagctcccccactccctaaccacatccccctctaccctatgatctcatggtgtgaccacaacccgcctcctccatgaactcttcctggagccagcaattcaccaatggcaggagcacaagagcccaaagcatcaggcagattcgaacccccagtgctactcctccaggcaaatctgtcttaccctgcttctctgactcatggctcccatcacccatgacaggtagtagcaatgcacaatggctagctgcatgggaaggctaaatgggtgggtgatggagggctggatggatggataaatggttcattcaatggtcttatgagagctgaactagaagggtttgggaattgactccagactccccaggtgccttctggtggggaatcattcatagcatcctcagccaggaggggagggcagctggagatctggatatgccctccctggcctccgggctgatggtgaatcatccaggacaaacaatgcacagtcctttcaccaggttctccaaggtgagggtgtcactgctcatcccagatgcccattttggggtcttaccacttgcgtgatcaagcagctctttccaacatccaacaaaacacacccttgtgctgacctgaaagctatttctacttattcagtcaacagtgagtaacatgcaagctgcatctcagccattaaacaaacaagcaccttttattcatactggttgaagagacaatcttgatgcaaggcagggtttggacctagcagttgacagctaaatcccagttgtgatatttacttccaagtgatcttgaacaagcgacctaacctttctagacttgggtttcctctactgccaaatgcagatataatacctttctcttaggtaatgggatcatatagtttgttgctcagtcaggacaatattgagagtgaaaagggggtgctattaataactacataagaccgcaaccagcatggcgaaaccctgtctctactaaaaatacaaaaattagccaggtgtggtgacaggcacctgtaatcctagctgctcaggaggttgaggcaggagaactgcttgaaagcgggaggcagaggttgcagtgagctgagatggtgccattgcactccagcctgggtgacaagagcgaaactccatctcaaaataataataataataataataattacgtaagacaacagacctcaactggggccaaccaggatgtatggtcccctactcatagagctattaagagccaatgagatagagtacagctgggcacccaaattcacaacaaacgacagccattattagcaatactactggtcacctgatcagctgggccttttccttcatctggatccctcccacatcttggattaccaactggtttggatacttccctaccagcacaccatacatttcaacagcttagtaggaacacctgctagctaatgttgatgttttcatctgtcttctgtcctgatgatagtttcacaaacttgattcatgctcaggtccaccagactcactcaagcacagctcaggcttctagcttcccagaaccccgacgtcaggggccagctggcagttccagattccctgactgccttggcagaggcccgcttctcaggcctcctgcagtgctgggatgcctcttatggcgtggacccattattggccttcatctgtgatcacagaccaatgggcagtgctgaccagaggacgggtggtgagggggtggttctgtaagtcctccaggcaggactacaacctggactgatgatgaatcaactcctgagatccggatttaatttggaggcttccctgggatctgcaggcctaatgacggcaagagcactcctgtcgtcgtcctgcctagagggtcagagaacaacctcttttgggtttccagtcactttggcactttggtttctctttattcacagtatggtatctttgggggttattttgggatctgttagtggctctactacttattaatttgtgatttgggcaaatgactcacgatcctcaaatctcaatagtttcctcaactgcaaatagggataaatgtcagctttgctgttagccttaaaagtatctttgtgggcatcagaaaattgctacaatataaatataaaaaacataaagactatgaatgtgagttgtgtcccctagagtagcacagtgctcaagtggggccaccatgcatggcggccctcaaataacaggccgccttccgagggctgttgggaagattaagtgagataatgtatataaagtgcttgagccatagtgacaatttattgttgttattcttttaattgctggaacttttctcatttctaacctttggggtgaactcaaaagaggatcccaggccggcagcttctgctgcagggcagaacacacagctccatctgatgaaaatgacagctcttcccacaaagtggccccttgcttgggctgtggcaccacagtggtgagagggatgcggacacatgatgtgtggccccaccacatcaggccaagcggggacattcagaggcagcccaccggagactgggtgggacccaagccctggagaggctgcctcccagtgtacaaaggctgtcacgtggcacagtcacaccagcctcacttgtggggagggaaaacccatgcgtgatggaaactcctcacaatacaatgtggaaaagcaattttaagaatcgtttttattttaattctgaagccaaggaaaacagttggatttgcttttctttgttggacacaggaaaaaagtgaggagcatcactttgattggagttgagttcttcttcagtcctaagatggctggaatgccggggtgggggtggggggtgttacttctcttgagatacaatgagttgaataaatatcaagagagcaaaagtaaacaaacttattactgcccattaagagccgccaaactggcaaaaaactgctggggggaggggaggaattggggttggagtcttggactccaaggaaaataaatgactctgaggctcaaagagaagcccaaggagcatggcccttggtatcaggttgacccaagtcctaggctcagtcacctttggctgttatctgccgtgtgttcctgggcaaatcactgagcctgtttgggttgcaatgtctccgttgataaaacaggggtgaataacaacccaccggattacctgggacaatgtatgtcaggcgcccagcacagtgccctgttccttcccttccttcctgtaacccaatcagttctgagtcacccccactaagcctaggccccacagaggtgtaacagtaggactcagaatcaatgtagttacaagaggtcccactgctcgcaacatgacctcaaagtcagctacccctacacctttttgagcttcagtttcctcagcctagaaatgggcataacactagtaagtcactctgagtgttggaatgattagatgagagaatgttgatgtgaagggtctggaagccctaaagccctgtgcaagcattagtcaaggagatggtgtgagtgcttggcacactgcctggcccacacccagcatcctcactgttgttggttttgtttcagctttgttgttcttgctatcgtattgctaacacattattccaatctcccgcttctgatgcacttccatgctgctcacctagtgtgcaaggtgggttggatcatcccatttcacagaaaagactcagcctttgaggtctcaagtgcaatggcaagaactctgtcggggagctgtgagagcccatgtttgggagaggatagaactcaaccataaatagtgcaaatcaaatctggaggtccaggaaggcttggaaaccaaccttgtcttgcagccaggttgcctcctgggcctctggcagtttcttggccacagtggagccctgcgcccacatgggcacagagaggtgtctgtcacccactgcctcaggtgagcagcctgaagaaggcgttggcccagcaggcctgccctagcccagggtcgggggcggctcctccccattgttctggggtgggtgtgaccactagcacaggggcagccaaagcaccgttggaaacgaggcaaacacttccaaactcagctgggtttccactgacgtcactgcagccccacctcctagcagagcccaaaccagaagctcccacacacctttctctgcctagcctcagagaggcctgagcaggccataggaatcatgcttgggctttgtcatttaagtggaaaacagctcagcaaggccccagggagcacagggtctcttttgtaactgctcactggctggtccaaggtggagcccagacccagggtcctcactggagaagcccccaaaggggttcagggaggacaaaatctttaggtcctgtgtcatacttgttattttagcacagattaatgtgaaatcagaaagtagtgatgctaatacccttttactagtaaaaaccagattaaatacatgcctgtgtcatcgttaagagttagcaggttccaatccagcagaccagggttgagccctggttctgccaccttctagctttctgattttgggcaagtcactcagcctcactgagtctcagtttcctcacctgtaaaatgtaaacagcaacagtatctaccttaaaaggagattatgagaacacgggaaactggaaaacacttgcaaaatgtttagtccagggtcaggtatatagcggaccttggtcaatggatgttattaataaatacacacataggccctcctctgcgcagctctgacctcctcaggcagtcacttgtccatgggatccctgccccaatctatccctctttccagcactcccagctgctcagcagctgttggcaggtgtgtcttgtcattccatcaacaaatatttattgagctcctatgtatttcaggccacgtggtaggcactgcacatggagcagtgaccaacacaaacacctccctaccatcatgcagcttgcattcaagggaacggggaggagacagcgtgtatcttatggtgataaggacactggagggggaatgtggtgaggtcacaatcttaaatcagcagggagggtctaactgagaaggtggtatttcagcaaagattgaaagaggtaagggaacaaacaacgaagaagggggcagggaccagcaagtataaaggccctgagtcctaactgtgcttagaacacttgacagacaaccaaaaggtcaaccaggtggttggaggagatgatcgtaggggagaggggtcagagatgagaccagggaggaagtgggggccagatcatagagtgccttggagacccactagcttttcctccaagatggtgagccactggggggttttgaatagaagagtgaccccgtttgactttttaaaaaggaccactctggctgtgaagttgaggacagaaggtaggatgggcaaggctggggcagggaggctagttaggaaattactccaatagtccaggtaaatgatgcaggtgggttgcaacagggtggtggcagggaggtggggagacacaggactctaagaatatttctggcatcgtaatttggcggtgaattagatgtggggtatgaaagaaagaaaggcgtctaggatgacttcaagactttcggcctgagcaaccagagtggacatttatgaacacaggaaaaactgggatgaacaggttgggttggagatacggggaaaaacgagttcatttctggatgagttgagatacctagcagatagtcaagtggaaatgtcaaaaaagcagctgtatgtatgagtctagagtcctggggagagttccagaaataaatgcggatgtaatcagtacttgagggtgatcaccaacgtgacctctggatgagatgactaaggtaaagaaaattctgaggactgagttttgggtcccctcaacagtagagaaaggacaggaatatgaggatgaaccagcacaggctctgaggaggaacagccggcaagacaggaggcagggtggcgctctggaaaggaaggtcaagaagggagcccaactgtatcccacagtgtgagagggaaaatattaatgaggatcaagaaccagcccttccatctggcaaacagacaggggatcctgtctagggcaacctagaatgaaggggagcgggcaaagcctgatgagggtgggctcaagagagaccaggaagagaggaactttctggaaatggtgagtgcaggcatctctttggaggctttgctaaaaaggggagcagagaaatgcaacaagagctgcagaggggatgtgaggtcaagagagggttttaagttgagagaaaaaaccgtatgattataggaaaaccatcctgatgttggggagacggtgaggactgctggagcaaggccctcgagtgggcaagagaagggatctagcacgtgtcctcccctccctcttggcccatttaactcctactcattcctcaagggtcagtgtaaagggcactttctcagggaagcattcctgaccctctaggtcaattccctgtaatactcctttacagcatgtgacagttgtgctttctggcatttgggaatggcataatgatgtgaaagccccatgagggcagggactggctccatcctgttggtagctgtatccctagccactagcatgctgtccagcaaatcacaggtgttcaatcaacatctggtgaaaggatgaatggtccaagaatagaagtgaagcaaatctggagacacattctgtgttctgctcccttctaacttaatcacgttgcagtggtcaggactgtgctgtcactggctactgcaaatatttggattcagaagagctcagttgtttgttcctgttttggctctgtagcttagctaacacagtgaccagagccacgtaactggacacatccttccactgatattgtccactaaaccctgaatgtattccataacatgtctaacgattcatttgtttatcaaatatttgcccaaagtgcaatatcctgggaatacagggttgaatcagacagacgacatgccctcatggagttagaatccaacagagaagatcaaacagaactgctattcagcacagcggtgatgggtattacaaggggaaagttcagggggtgtgaaagtatagaatagggagactcaacagtctgaggaaccaaaggtagcagaagagagagaccagaaaaccctccctctgcctcccctccccagcctgaagctgcctggatacgattctcaggctctaggccaggagttcagcaagggggctgcgggcattggagctggctctgggagtagcagggccatggcctcctgccttcagatgccctgagaccctccctcttcccttctacctctgctggggcttgcctgtctcctcttgcttccagaatggctgcctgttctctgactccaagagaatataacccagcatcctgaagcagagtttttggaaagctctgcctgcctggcgagaaggctgggatcactgatggcacagggcactgacagtggtgggaccatcactgattctcccctctgtttactttcaggctttcatagattctattcacaaagaataaccaccattttgcaaggaccatgaggccactgtgcgtgacatgctggtggctcggactgctggctgccatgggagctgttgcaggccaggaggacggttttgagggcactgaggagggctcgccaagagagttcatttacctaaacaggtacaagcgggcgggcgagtcccaggacaagtgcacctacaccttcattgtgccccagcagcgggtcacgggtgccatctgcgtcaactccaaggagcctgaggtgcttctggagaaccgagtgcataagcaggagctagagctgctcaacaatgagctgctcaagcagaagcggcagatcgagacgctgcagcagctggtggaggtggacggcggcattgtgagcgaggtgaagctgctgcgcaaggagagccgcaacatgaactcgcgggtcacgcagctctacatgcagctcctgcacgagatcatccgcaagcgggacaacgcgttggagctctcccagctggagaacaggatcctgaaccagacagccgacatgctgcagctggccagcaagtacaaggacctggagcacaagtaccagcacctggccacactggcccacaaccaatcagagatcatcgcgcagcttgaggagcactgccagagggtgccctcggccaggcccgtcccccagccaccccccgctgccccgccccgggtctaccaaccacccacctacaaccgcatcatcaaccagatctctaccaacgagatccagagtgaccagaacctgaaggtgctgccaccccctctgcccactatgcccactctcaccagcctcccatcttccaccgacaagccgtcgggtaagtgcttctgggatcgtgttacatgtgggtctcagagccaggcaccaggcttcccttggctgtgtccacaaatggggaaaagccatggccagttgaagccaggccaaagacatgcacaatcccccagcaatcccttgggctgagctgctggagccagcagggtgacgggtggcaggggaaccacattccttagatggatcctcaaagatattaccaaaaaatggagtttcagaagagggcaaacactctctggtttctgacaggaaagaacccagagcctgtagttttctaggctctgcatgagatcccgtgtgttggcagatagaagagaatgtctctcctgcagctcatgcactgtgcctggcacagggttggccttctgtaaatgttcaccaaataaacaatgggccaaaagaaaagaaagtattacccatgttaagaatatgataaacacattgtaggggctgggcatgggaaggagtccttcctaaagcccacacacttcctagagtctgctgctgtctagaattttcaatgatgcttccatatgctcttacatacacgtttcatcttaaaatacagcaattctccgaataccgttatgggggaggaatgggattgctggcaggttttaaagcttaaccaagatactggcaccggacatttccatgtatgttacataattaactcctggagctccttgcggacaggatgaataacttgctaataggcttaggatgttcaggctagatttgcattcaggtcttttcactttaaatctctggctgacttctctatgctctaggactctaggaatcatcatttctggaagaagcaggccagaggctcccctgtcagaatgtcagcacacatccagtcccctgaagctcagccccttgttcatccagaacacctgagccttcccagtgggctgccatatgagaactatattcatctctgcataaatgaaccatgtatctactccaagtcagtgctttcggtaccatttcattgtataggcagggagagatttttactgaaaatatcctgctttacacttatttcacacttttaaaaataaccaccagtactgggaatagcagcttcttgctaattccaaagaggggctgaacctgagtgcaggagggtggccagtgcagaggacaagggcagcattgttttcagatggggtgggtgaggtgagctaaatgcaaagtgagcatccactgcagcacctcaaaggaaagacctggcctgggtgcaggattgagagcaggcgctttggagtaggctggcttggatttaaatccggtttccaccactgattagctctgggacattaggcaagtcactttgtccccctgaggctcggtttcctcatctgttaattgaggatagattaaaatagtgcctgtcactttaggaaacgaaatactgcaaaaaacatgtttagcacaatgctgggtccacggtaaactacaagcctcctttgatctaggtcttttcatcttaaaacaaggagactgaaataaacagtcccttttttagctctggcgttccatctgtacacgtgtctgctttaaatcagaagctctgaaagagagggcagggtgtgttaatttgtcttgatagaataccgagagggtaaaacgtgcccttgggcaccaaacaaaggctcagttgaatgttgttataaccctgactggagacaggctggactcaatggttactcaacagatctcctctggcctaagtgtctctggtttctaactcaaaacatttcaggacattcctgggcttgaactaagctggcagatacatagtataggaataagacctgggtttgcatccatgctctaccccttggttagctgttcgctcatgagatagttatttaactcttctgagcctcaattttctcctctgtaaaatggggacaagggtcataacctcacagtgttatgctgtggatacaatacaatcaagcatgaaacattatgtcatgtagtaaagccaacatttgctgagcccctactacatgctagtcgcagcactagacttggggaagtaggtgacaattgtggtccctgacctccagaaactcagtctggggtagacggcaggtgcatgaatgcatctgggatccgtccaatgcccatgatttctagtccctaacatcagcacatcagatctgacaatggatttctctgggagggagtatccgtcgaggccaaaatttctaaaatcaggaatgcagtgaaaactgggctgtctgatcactgtggtgataccctggtgtgctaagtgccctgggggacagtaaggtggcatgactaattctgcctagagggaagggagagattagatagacgtggcacttctttgttgcatcttgaaggatttgtaagattttaccaggcagacctgggagttgggaacccaagtgactagtgggtccctgatggagatgagtctgtgcaagggcccaggggcacagttctattcctggcacctcaaatggttcaatctcctgcttctttgtgttcacaacccagtgtgggctgtgtgtatccaagtgtcctgcactcgcccgtcttttgtctcccacttaagaaagcacgccgtcatgggagggaatggcagtgatttcatcacagagataactggaatgcattagaatttatccttctttgttacgcaaggatccccaaatgttggtacttgctcattaccagtagatttcttgtgacccatctcaccactgagctcccacacaaggcgctgccagctgggattgagtgcctagctgtggaagatgaatgggtagacagagcccaggaagagagcagctgggggagggtcctgccctctcctggtgttgaggactaaactgggaggaaaaaacagatggtctctctgcacggaacagtcagggcatccaatgagcagagaacattcttatcaggtctgttcagagagcttggggcaggttcttatcctggaagacaaaacactcttctgtgctcttacccaacagatcctttgttcttagggacatcacttagccagaaatacctttgcaattaaacacctttgcatccgagccttggcagcttccaaacctttcactcagcagcctcagagccatgtgctcttttcttcgtctgcccacagcatgcccttccccaggggactaagggagccatggctgcttatctgaagctgtaccacaagcctgttcccagccttactgagacagtaacagggtggtcccaggccaggatggcctactgagagcctgagtgaggaggcacaggcagctcctggcttccctggctcctcacctgggctttgtcctgtgtctctcaggtctggccagacccaaaggcattttgattaggatgattctgtgatgaggcctgggccaaatggccctatctgtggtcctctgccccacctatcctgctgctgctattagaagaggaaggctccaggggtcattctctaagaggcaaaggatagagcaggcacctgggttctgggaggcctggtactgtttctcaggccacccaaggcagagccacacatttgccagccctcctgcacagtgcccatcccagagactgatcagggaggaaaggacagcgccaacagcagctgccacagacgggctttgtcagaaactaatctttaaagaccaaaaggagtgagcacttttagctgttttctctcctgagaaagagaatacaaccagttcactttatttctcaatgagtgaagaagaaggggccataaaaccatgaaatactggaactattaggggcctctcagatcccctagcatggccttcctgtaacagagcctgttggtggcagagcagagatcgaccctgggacttgtaccttgcaggatattgaggttcatagaggtcaagtaacttagccaagggtacacagctagtaagtggcttggccaaggctcaaaccaaagtatgttttaactactctggatattgcacacttccacgggaaggctggaggggaactggtgtaaaaatcaccccgtgaatgtctgatttggccccagctgccacagggacctgaccttctatctctacttcctgaccttctagctctacttcctggtaccacgttccaaacagttccttaaaatgagctctgggaacaaaggtggtagatttgttattagaacatggttccaatgacacaaaacactgtcgctaccaacccaccaacatcatgctccccctccctaggcctagcaggaaccagccaagctccccagtagaaagtacaacgtgcacctgactcccagcaaatggacccaactgaagtctaatttttaatttttatcaaatctggacatatcctctggggttccttctactcagcatttcaatgtatagctaagtctttcaacatatagctaagtgtgaagttctgatttctttaaatgttagccctgactgtataaatgtcagtagacatgaccttcccttgggaccacatgaggaggtccccacattgcttcactgacaagagtgctagcaggaagccaccccatctcacaacagatgggctattgggctatggccaggatggcatggacaacttgaacaagagtgttttcctagatggattttccacctgtattttattccaccctataaggtaggaaatacgtacacgattgtggttccccagcacaatggtatgttttaaaacagagaaatatatgatgttgtagctcccattctttctggaggtcaagcaagcaaccaggtgaaaaggtgtcaacccatgtgtggctgggtcagcttcagtaggctgggcatccaggcccaagcactgcagagaggtggagaagcacagggtgtgtgtggtgatggtggcgagtgagggtgactctgcccatcctgagtcagccttcaaggtcacagaggctgagggaaaagcccacacaggtctcctgcctccagagcgtgtgctgtttccactgtacaatactttcttttattctaaaaggttttgttaaacaaaataagatttcaaattcagtacaaactacataatccagtgatttctcaaagagcactctttgctagcttcttcctaaacaaaatctactctaggaagatggcccacctggatgatggttccaggagggccagctcccttattgctttgctttctcttcctcctcttctggtaccttggggaactgatcacaaagagccttttgagggtgatggaaagctacccctccattcctcaggcagttttccaaagatgacacttggctaaatgctcagggtatttacagtcataggagataaactatcaacttgttactgttaaaaaaatcttgagatctgggatcttgatgcctgaaaatcccaagattggtacttggcaaactgaaagaaatctagaaaaccctagagatcaggcatctgtggccagctaactggtcatacaaatggattgttgtggtgaacttgtatagtattaatcctgagatgctgtccccctccacccccacccccacaaaaaaaataaataaagtagtattaagttagcctcatacaaatgctggcaccatgctcctggacttctcagcctccataactgtgagccaaataaacttcctttctttataaattacccagtctatgctattctgttatagcagcagaaaatggactatgttcagtcttgtaaaagtaatgaagtatatacttccagtggtttatacccacatcagtgaaggatgcaggcagcagagacctcttgatgggaacactggagatgatctttcctactatccccgcatcaccactgcctcaacttcggctctccctggcatgaatctggtcaaagattatgctgaaaataagcctgatggtcctcatcttatatctcaagatgagcctgtggaactacagggcctggagtatttatgtgatcctttgtttaaaaaaaaataagttacttttccctgatatttttgaatacagtaagtcaaaactactatacacacagagaaaaatcttgctaagacaatttgtttacgttataaatgcaacagctcctaaatgttgaaattaagtatcttagatggtatgtctagagtagggtccaaatgaacaaaaaatccactcatctggcaccatcccagacataatgtgcagagagaccactacaaactgtccaggctttcccacaaagcaggtttcctttgccagggtttggtctggatgtggattatcatctgttgtggggtctctctttccagatggatttattattattggttctcagctggaaagcacagaatgaaggtagcaaaggggatgcagctcaggatggtgaaggatggagggtgaaggatggagggtcaaggatagaggattgaaggatggagggaggcacacagagcattgagggactcatggagtgagcctgcaagggttcctgcctgaaaggagcccacagtcttatggggacacagatccccaacaatcctaatgtggtgtgataactgcagcacagaaggtggacctgagttctaatcccagatcctccactttccagtcatgtgatcctcttgagccctggctttctcacaggtgcaggggcttatgaggatgaaatgaaacggtgtgcaaagcacatggcaggtgaaaggctctagatacatgatcatcaccattcttaccttattccagtagagataaatatacaaagcattttgggaacactgaaaaggataaagtagctttcctggggttggggaaagcttcctgaaggaggtgatgaggaaggtaagggccttgtggtgctctcagaaccaccaccagtgatagtcaagaaatcatgaagacaagtcttggtgccagacaaatgtcctgctttcagaaaaagaatgcataccagaaatcacatacaactggcttgtggtgaagccccagtaaaattatagaaaagagtacacaaagggttcgtgagcatttggaagattaaaaggtcaccaatgaaagccgacataggttcttaaagaagaaaccaatgaagctgatcccttccttggaaagggttaatacactcgccaactatgggactgctacctgtccatatctgtggattgtagtcatgggtctgataagttcttccatgatgtgcctgcaggacagcaccacagtctctgacagagccatggccactctcattagtgtgcctgtggaaccctggggcactgcccacctctacatcagagacctccctcacccaggaagccttgggtacaactggccactgcccccagggagccaaggtgagctgctcacctctgtacacagtgagaccactaaagccccttctaaactcttttttaaaatgtctttaaagcccctgtttctcctcctgcccaacagcgctggtggaaacctaagagcgacgcaatgctttggacagtggcctctggaaagtagtgctgcaatgtctgtttctcccgaggtcaaatgagcagaaacaggacctttataagccctttctgggccctaagagctcttacttgagaggcctcaggctgtatcacatgcattgaaatgacctacctcacacatttaatagaatttttactggaacaattttgaaaggatttaatacttttgcttttaaaattatttggctaagagtaactcaattaatttatggttggatctcatttctcagtaaacatcaagcatattcaggaattcttgggaagtgaaaaaaatctaacctacaagttgttttcaaaagtagtaacattttcatgaagacaaaatttaacaattaatgaacttgacaagatgtcacactttgtagtaatttaattacatacaataaattttgattttgcagttttcttttcatattttagagccagtaagtctttttaggcctcaaacattttcatcaactcctgaaacactcattggccccaggcaccatgcccatcgtttgagggctaaagcggcctgaaagcaggcacaagcatttggaccttttccctggaatgatcagaaatgacatgtgtgatatcaactctgaggttctgcaggaactgaaatgcctttgggaccatacaagctattcctgtgtttaggttattgttttgtactctggttcgctgaaaagcagtgattgacatagaatatatatacatccataaccagaatcttattttgccaagcctctggataaatgagattcgaagacccccaataactgcttctcactgtagccacccctcacaccccatcccccgaccctgtgtgtctgttctcctgccctcatggggtgcccagtgagtcctgatgctggcctgggtgggactctcacctaagcaggccacgtgccgtggcactcagatgcattaatttgggtaggaaattgcagatccaatttcaacagttagtcatttctcctgttagaaaaatgtttcagggagtggtaagaagactttttggagacagaccatcagtgagagtaactgaaaacagcatacagttctcatgaaaagcagactgcatcttagtgatatcacagaagcctctccctagtgcctgcgtatggactaaaatattcacaggagcaacttcccagaaccaagagccccccagaacatttcccacaggccacagggtcctctgagtggcctaaggtggtcaaattctgacacctggggctggactcaggggataaaaaggactgtcaggctgctggccagccatggggtccagtcccgctgtgggcaggaaggactctgctcctccccccacacctcaggcacgtcagagagaagaggcatccctcttgcccacggaggcctcactgcttagctcccagcctcaaggtcagatattcacggagccatgttttcctagtaagaggggcactgcactgagagctgatgcagtttgtgagcccatttctccactagggcctggacgggtaaatcaggctgatgctggtctgccccagacccacagagagagaactggaaataggaagttatgcttgcctggcctaggtgccggttctaactcagcttgaccagaaaggccctgtgttgggagtagcaagcactgtatcagccatcaatcaagtgggtcctggtttcctgggaggccatggtccttgtgtgcctaatccctgtcaagaaccccagagaggaggaaggaagcacccaaagctgatcacctccaacacttaccagggtatggcagtggggtccgggctgagacctgtgtacttggtactcccctacttgctgatgtccctcctctggaggcctcctgaccccagaccctgtgtgcctacccatccttgttgcttcttcagggaaccacacagactcggctcagccacggggctgcatttctcttcacgtggaacatttggccacagctcccccaagaatgtaaatgtggtctttatagagatgaggtcgcagcactcgctccactctgagcccaggtgctgccgagttagtgttggcctgatgctctgggcagagctgccctctcagaaggggcgccaagttaaacaccgctaggtactctgcactggtccaaagggagcgctttgcccactgcacgttgaaaactcagtttcattgacaaaaaagatttccattcttcatgtcaatatatctttgtggccttctccactgaaattctgacttaaaaatacatggaaaacatctactggtaaatatcttacatttagtcttgtattgaaaagcaaatatagtaacgtgtgtggaggaggaattagttgggggggtgaacaacttcaaaaatgtcagctttcatctatcaaaggaaacagaaagggataatcttcacagagcacctgccccagctggctcccatgctggccgctcttgggttcatgacatcctcagaatagctatggtctcttcccatttcacagaagaagaaattgaggctcaatgaggacactgcccaaagtcacactgtgcataggtgaggccatcgagattggagccaagggctcctgactccaagtgtggagtctccctccagccctcgcttcctcagccaggtcttcctccatcgaggccagacccttgcctggccccctacgagggcattatttatatggaacagctatagatttttcacagtattatttatatgttacagttgtggatttctcatcaaagtaggatgttttgtctctgctattttaaaggagccacataattttactgctgacaatttttcaatgttaactctttttctgactaattttcatccatcagtgatgtttctgacctttgccactggtgcctttaatgtgtgaaaaggaaatgtgtttgaatgcaggagatttcacagaggtctactaagggttctaagggaaattgtgtttgaatttgtgtttttgatggaagctaatggggcctgattgtcatgtgaaattccgtgtacagacacatatgcacattttttgtaacagcagaaaatactaaacatttctacacaatttgatacctactcgattattctagaaagccttaaaagaattaccccgtttgccttttttaaaaaaagaaaaacttcttctacatcataacagacactacaatcgttgaaaaatgggcaaagaacaccaaaaggtaaatacggaagaaaaaaatcattaaagatttttaaaagttttacacctcgacaaagaactgtaaatttttatgttttatttttttcgctggctgactggcaaagattaacattagttctaaggacacagagctaagtcagcatggatccctcattcttgagttcgttctggttgggggaaaagaagtagtgtgtgagctctgcacaccccctgggtgcatacacctgctgtgtcctttacccaccaggtaaccttgaggggctcctctaatgaccacagggtctgctttcctacctcacaggagtgtcaggagggtcacctgtggaaatacgtggctaggaccataggaaatgctcagtacacactggctattattattactacttcagtcactactcttagagcaaggagtttataacctgggactttgggaatccattaccttctgaaactgtatacagaattgtgtgagtctgtgcatttttctgaataaaggatctagaaccatccccaaattcttaaagggactagtagccccaaaacatttaaaaacacttgcctttaaaaagagcccttggtggaaatgccaaaggtaaaactgagatcattcatggcgcccacaaaggcagccccagctggagccacgaggccaactgccactctcccagcagcctccacagcctctccctacgtggcgcctccttcaaaggcagcctttacctctgacaattctgcagcagtcctggcagctgtgcagtaagaggctgggctgctcgctctcagtgggcgttattttgcaggcttctgccggatcttccgtcaccagcattcacatcgaacggcctctcctgtgctgctgacttggtaaggagctgggaggcctcccacgcccaccggcgctctgctccagctgttggggacagactcccattctctgcctccatccctggggcttcagctaaacacaaccaaaacctttttctccttcacaaatgctctttctggaggtctagcctccccttccctgggaaggatactgagggagtggtgggggaaaggcaggaagtggcactggcaaaggaagcagctgcttgtgccccatctgctaccctggggtggggagcattgggtcctgccccatcccttagagaagaggcctggcaaaaaggtaaatgggtgagaagatccttcctccccagaagatgaagggagaagcccctgagttaagtgtcagcacccaaaccaatctttcttatcggggcaatactgggcagtgggaagcaaggaatgagcaagacagcccctgccttcccgtcaggttctaggtggatgaatgctcaaacacaaggcttcttcctcaggaacagcccacctgagatgtctaacagagaccagaaacctaaatctttctggtttataactattacgtgtgaactagttgagcccaaacaccagccaggaaggaatctgagaagtgtgacctgtaccagaaaagctgagtatacctgtcactgatgggcacctcccttcaactcacacagaaagagaaaggacaggagtctacaggaattcaagtggggaggaggtagtgaggtcagctcctcccttgcagggcgtcagagcggccccaccctgccctgagcttccgctgcccagcaccgcatctgcagaggctgggactcaatacacagttgttgaataaacatacaaattgatagaaaacatacaatggtactttcttagcacttttgtccttaaccagtctcattgtggggatttttatttatttatttttttgagacggagtcttgtcttgctctgccactcaggctggagtgcagtggggccatctcagctcactgcaacctccacctcctggattcaagggattctcctgcctcaccctcccgggtagctgggatcacaggtgcgtgccaccacacacggctaattttttgtatttttagtagagacagggtttcaccatgttagccaggatggtctcgatctcctgactttgtgatctgcctgcctcagcctcccaaagtgctgggattacaggcgtgagccaccgtgcccggccctatgaggaatattttgaagagactgaagcaaaatgtgattttctttctttcagccattttcatctgaatggctaggccttgaccttctaaagcttcctcagatcaatgagaaaggccccagcctgtccagacccttggtgactcaagtttgtaccttcttgctgatgtgaccaacaatggaacataagaaactgcctggggagggcagagttgatgggcaggggtggggagggctaaaagaccagtggtataacacccattccttctgactgggctgcccaagctcagtgcagtcacaaagaatcacagaaccctctggtctcagtttcagaagagagccatggattgggctgtatcctggacatcatcctttaagtttatgagcctgcaaggaggacctcagaatgcgtgagtgccaagcatctggccctcactgagcttcctttggaaaacacacagattcagctgaaagggaacctggccccctaaaaacacacttgaagagcagtgaatgaattgcagaaatatcccaaagtctctggctacatggccaaattctgggcatggcctaggcccctgtgactgtggaagttcatttagtaaaagctgcagcagtcatcacgaagcactgtcactggaagggcagacgtggagtcagaattgaagggtgccaactgtacttggcccccagaaacagtaatccagtggaactgagtttccttgcagaagcaaagccatcagagcctgcaggcactgactgatgttgccacgtttagtaggtccacatctctttttcctaatataatgaacacgaaaaagatcactccagcaacttcccccaaatgatctcagtaatcctgacaacactatatgagggaaatctgatcttccttctacaatcagaagaaactgggggctgggagaatgaagaagtctgccaaaagtcaaactgtgaggcgggtgagaggagaaagtgagcttggagtatgggcatcctgacccctggtccgaggctcttgtctttataattacttattaaactcgcaaaacaaaaattggttacctcagaccgtgggcctgtggctcccagctggagcctcaacagaggttgtgcctgcttggggtgcagctgggggtgcggcctggtgacaggcaggtctgtgatgtatatgcatgtctgtgtccccaggcccatggagagactgcctgcaggccctggaggatggccacgacaccagctccatctacctggtgaagccggagaacaccaaccgcctcatgcaggtgtggtgcgaccagagacacgaccccgggggctggaccgtcatccagagacgcctggatggctctgttaacttcttcaggaactgggagacgtacaaggtgagactcggcaggggatgtctgtgctgcccacaaggtgactggcccaccccaagagaggcctgagcaaccaatagaagagcccactcagaggtacatgctgaccaagcccaggcctgtgcggccccaacaacacatatacctgaggcgagaaggatgcagacagggccattttgcaaacccaccaggggtagtgaggaccagcgcctcctctgcctgctgctagaaactgctgcaggacaagagtcagtagaccagaccaccacagccccacaggacagggtgagagtttagaaacgctggtatgggggcccaggggtgaggagcatttcactcccaagtggggtttccatggggaaagacccgctctcaaagcccagaaggcgcaagtcccaagaggctcccagttcctgggagaatcccccaaaaagtcctggtagggagttgtggcaatgctcaagtcctaattccaggctcatcctctgggctccctggttcccagggagttgaaatgctcatctgtgtagcagggaaagttgccaggactcagtcatacatcgttcttccccctctaaacagaggtagtactaaggaaggcaagagtggctctgtttgctgagtgcccaacccgtgccagcaccatgctaagggctttcgtgcattattttgtttaatctcgtatcaacctcctgagggaggttctgttatggacccagcttacagatgaaagtgtggagtaatttgctcagggttgcaaagccaggaattggcccagtagtgactgcagctgaggcctctgacactgaagctcacaaactacctgaagccatgatgccttgcacacatggctctgccatgccccttcttgagtctcctgtcctggttgtcccccaccccacctcctgaacagcctgtgtctctgcttttttctcctcttccacctacattaggagcgggagactcctcctttcttagaggcaatacagtgcaatgattaagactgggttcttggttcaaatcctggttcaccctcaggcattctgagaccctgagcctctctgggcctcagttcatccatactagggaggataatgatagcacttagttcttcgagttgacatgaggattagtaaaacaacctatgtaaagttcttaaaacagtgccagcacatcacaagcgctcaatactaaataattattgtattaatgaatcaccgattcccaagactttagtggccgtaactcagctgctgaccccaaaaccacatgcaaaaaaaaacaataaccacaaaaccactgggttttagacctagaggggagcgccggtggatgggacacatgcgtcacagctcacacccgtctggtgcgttacagcttacacgtgaccctcacacacagctcatctccagagaaggaggtgaagctcagtgaaggtcagagatttgtctgaggaatgcctgctgcgtgcctacttagtgccaggccctccacctgccacagcacacgtgttcctgcagcaagcctgtggggaaggtaatatagcctccctgatgtaagaacaaggaatctggggttcacatgatgcctggcacagggtaggcactctacatatttttgaataatgtgtgagtcatggagagattaagaggtggagtaggggtctgaaccaggtctgcttcatgctctgcttgtttcccaggcccctctatccagggctgagtgtctgacagccaagcctgctggctgcaggtgctgcaggctccacattaacactctcctgggttttccccagcaagggtttgggaacattgacggcgaatactggctgggcctggagaacatttactggctgacgaaccaaggcaactacaaactcctggtgaccatggaggactggtccggccgcaaagtctttgcagaatacgccagtttccgcctggaacctgagagcgagtattataagctgcggctggggcgctaccatggcaatgcgggtgactcctttacatggcacaacggcaagcagttcaccaccctggacagagatcatgatgtctacacaggtaggaaaagtggagtcaaacccaggtgcagggtagggaaaagaggtcaaccagagccagagcccctgactccagggcttggaaacgggaagatcccagggtgagaagcagctgggccaagctgcctgaccctgttaccaccccctgagggtcccttctcctgcccacaggtccccttcacaaagctgggtcacagtggcatttacaaattaagaaaaaaaaaatgggatggggcgagacataaagaggtatacaaatcacacgtaccagggccagctggggccaatgcagaaagacatgtgttgggctgtggcctcaccacttctgtcccaggcacctggtatagagctaaccaactgcgtaggctctgggccacacacctgggctccagtgctggccccacctcctaccagccatgtgtccttgggcatactgctaaatctccgtgggtctcagtttctgcatctggaagtaaggacaagaactacattgcagagtagggagaagggtagagagaatgtacctaaagtgctttgtctaggatttggcacatagcgagggctccatacaaactggctttcttcatggtcactgttactgcatgtaatgctagtgcagtgctgagaggaagctattaagaggaaagcagataggagagagaaagtgatttgtctaagatcacatgcttcaaatctaggtctttactaagaagtctttattaaacaaaaaacaagagaaaaaaacagaaaatcagaagaaacagagatatggtctggccctgagtccagatatcagcctcccacacagttaatgcctccccagggccaacacccagtttcttgagatgaaggcctctcagtctgccatgctcctccctgaggctggcaccacctgacggccgatgctgcctccaggctcaggctgtctgctctcaagggcaaacccagtcccctcctgcctccatttcctatgtggtcttggtcagaaggctactccctcccacttgagaagcgagctctcaagactgtcctacaaatggcctgtacttcaggcaggccctggaacctacatactaaggtggaggggatcctcatgccaggtccccatagcagccacattctgaagggtaattctcccaacatcaggggacaggagggacatgacctgcccatccctgtatcacacagacacctctgtccgcccactgacactgaactggcctggcccgaaggggccctggaagaggaacaggccctcattctgaagcagtaggggctgccgaggcttctagaagagcagggcagaaggataaccttcagagctggtcagaccctgggacacaggggctgctacagcctttctggagggccacctccttagggagcggaaagtgtattctatgatccaaactcagatctagccagcagcaaaatcagtagctggcaaggtccttgtccctggaggtgtgtgggacctccgctggcaaagaggaggctggttatggcgtgcccaaggatctccctgctataccagtccaacactgccacttggtccctgtggcctggaatcatggcccagagggacccccagaaaaactctgggaaaacctggctccacctcccctcttgctttctgcctcagactgagtgcgacctcctcacctcatcccacggcctcggccacctgctctgttgggccctccaacccacaattctgactggagcagcccctcccctgagtacggggtccccttgccaggcccagtcaggaaagtggggaccccccttcactaagagcaatgctggcagatagtggccccctgtcctcctgccacagagtgcactgcccctgcatgcccgcgcacaccttcccacagtttttactgttgttctgaactgcttgtccttggcagcaaaattcagcatgatgtgataatgccaagagttttatggaaatatctttcctttgtgaagtaatacaaaaaattgtttggatggaatacaagctggggaggactggaggagcatttcttcttaaacactttctttgtcattctttaaagactcctgatccaacagtttcaactcaaaaattcctaagaaaaagcttttctccctccccgcccacctcaggccatctccatttcctatcagaacacaaggtgtggagttcccttggggcctcctttgcacccagccctgggctaggtgtcaagtacgcatcctcattcaatcctcagagccgccctgtgcggcaggcgtcatttttattctcattttacagatgaggatacagtggctgggagaggtcaagtcacttgtctgagatcacacagctagttagttacaaagctgagcctcaaaggcgggcctgaagcatggcctctcaccacccatggagacgggtccacctttcaagcgttcttgctccagatgcctcccagagagggctttgccgaaagccctgagcactatggacgcaagtagaatggcctcctcccagacaccctctcactgccttctctcttgcaggaaactgtgcccactaccagaagggaggctggtggtataacgcctgtgcccactccaacctcaacggggtctggtaccgcgggggccattaccggagccgctaccaggacggagtctactgggctgagttccgaggaggctcttactcactcaagaaagtggtgatgatgatccgaccgaaccccaacaccttccactaagccagctccccctcctgacctctcgtggccattgccaggagcccaccctggtcacgctggccacagcacaaagaacaactcctcaccagttcatcctgaggctgggaggaccgggatgctggattctgttttccgaagtcactgcagcggatgatggaactgaatcgatacggtgttttctgtccctcctactttccttcacaccagacagcccctcatgtctccaggacaggacaggactacagacaactctttctttaaataaattaagtctctacaataaaaacacaactgcaaagtaccttcataatatacatgtgtatgagcctcccttgtgcacgtatgtgtataccacatatatatgcatttagatatacatcacatgtgatatatctagatccatatataggtttgccttagatacctaaatacacatatattcagttctcagatgttgaagctgtcaccagcagctttgctcttaggagaaaagcatttcattagtgttgtattacttgagtctaagggtagatcacagactgtgtggtctcaactgaaaggatcacccttggcatctgtgtgcctggattcttccagaatgtctacaatgctaatctctcacatagaggttcccagcttcttaagaaccccttttggcacctaatcaaatttcaaaatccctccccccacattttcatacttttccccattctcaggacttttcaccatccatcacccacttatcccttcatttgacaccattcattaagtgccttctgtgtgtcagtccctggccactcactgcagttcaaggccccctttccgctctgctgtactcctcgcctacctactccttgccttttctgtcgcacagccccttctttccaggcgagattcctcagcttctgagtaggaaacactccgggctccaggtttctggttgggaagggaaggccaggccaaaagctccaccggccgtatagataatgtactcgcagttttgtatcttccattcatactttaacctacaggtcatttgagtcttcacacaaataataacctatctggccaggagaattatctcagaacagaagtcatcagatcatcagagcccccagatggctacagaccagagattccacgctctcaggctgactagagtccgcatctcatctccaaactacacttccctggagaacaagtgccacaaaaatgaaaacaggccacttctcaggagttgaataatcaggggtcaccggaccccttggttgatgcactgcagcatggtggctttctgagtcctgttggccaccaagtgtcagcctcagcactcccgggactattgccaagaaggggcaagggatgagtcaagaaggtgagacccttcccggtgggcacgtgggccaggctgtgtgagatgttggatgtttggtactgtccatgtctgggtgtgtgcctattacctcagcatttctcacaaagtgtaccatgtagcatgttttgtgtatataaaagggagggtttttttaaaaatatattcccagattatccttgtaatgacacgaatctgcaataaaagccatcagtgct

SEQ ID NO: 28 - DNA, 10373 bp, Homo sapiens
gcggcgcgagccacatgcgagcgggcgcctggcggcggcggcggcggcaccagcgatcccagcagcggccacgacgcggacgcgcctgcggcccggggagcagcagcagccacagccacagcagccgccactgcagttagagcggcagcagcagcgacagccacagcagcagccgccgcggagagcggcgctcggcgggcgcgccctcctgaaggaagccgcccgccccccaccgccgccccctccggcgtgttcatgcccccggggtgagtgtgcgcgccccgaatcctctccggcggcgatcggccaggccgggtggactccctggaggaggtgacaggagtgcaggcggagagcagtgtgggcgccctgcctccccacaccgcgcctctccaaaccccgcgagggaccctgggccagggtcgccgggtgagaggcggctcggcgttggggcgccggtctgggcgcacaggtgcctcggcggtctggcgggtttgtttacaaacaatggggtgcgggctcggcagcgccccctggcggccagtgcggccccggggaagagggtcgaccccaggggtgccccagcccccaaagtccgggaggggcgggggggcggcacggaggggcggccacacccagggcgcgcgcccgctgggggcggcgacggggggcggctcgcgggccgtggagtctgcggctcctgcgggcgggggctgcgccccagcaacagccggttattggccccgcgctcgcctggcgggcggggcgggcgcacgtggcggcggtggggggggctgtgacagcggaggggggtgtctgggaccgccgtgggagcgcgcgtgtgcggggttgtggatctgcaggtgtctcgcctgggtgtgtgcgcgtgtctggctccgagtttgtgctgggttctgcagggagtggtggtgtcgatccagaggaatgttggggtttctgacccgtcggggtgtctgcgtgagtccccgcgcctgtttgtgtggggttctgtctgtgggtgccctgcttgtggggtgggtggacctgcgtgtgttgtcggtgagagttgtctgtgtgtgctgttccgggatgatactgggggtctgtggtgcctgcgtgtgctggggtgtggaggttgtagtgtgtgtgtgttgctggagtgagctgtttgtgtgtttatgtgtgtgtcttgcccgagcgtgcgatatgtgtgcttgtgtcttgcctgtgtgtttctgtcttggctgaggccgtctctgtatctccggggcatgtgtcttttgcccagcgtttgtgatgctgcgcctgctaaatgcaaatgtctgttttctgtccaggtgtctgtgtgagttgtcaggtgtgagtgtgtgtgtgtatgtatgtgtgtggtggggggttgtttcagtctgggtttggcttgtgtgtctggcatcagcgtctgggatttgaggacccaggatctgtggggtctatgcagtgtagacggtgggtgttgctggcagcctctggatggggttgtgtctgagcctgtgtgtgtgtgtgtgtgttgggtctgaggggcttgtcactgtgatcggctggctcatgtgtgtcatgtgggctgcgtgtgtgtagtgtttatgtcagtcacgtgagaccagtgttttctgtgggtgcgctaggtgtgtgtgctgctgggctgtgtgggattagagttagctgtagggtgtgtgtgtgtgtgtgttgctgacagttggtgatgatgtttgagggttgcgtgaggagggtgggttggtgtctggtggtgtgttgaggtctgatggcatgtgtctgtgtgtgcctgatctacgtgtgtcctgagagttggtgacatgtgggtgtgttttgggggtgttgatgtatgtgtgtccgtgggtgtctgttttgtgttgatatgtgagtccagaggtgtgcaggtcttatctctggagtgagtgtgtgtgtgtggagaggggcatgtttgggaactgaggcagtgcctagcttgtgtgtgtgtgtttgtgtttgcaaaggctgcattgtgtttgcatgtgcccctgggcatatcaacagtgggtcagtgtgtgagactttgacagtttggatgtgtggggatggattgtgccagccagtgtgcgcagtatgtagagtgcttgtgatggtctgtctggatgctcctgctttggtcgggggtgtgtgtgtattgtgtgtactgagtagtgatgtccgagactggggccatctcagtgtttgtgtgcaagtgggaggtggggtgggcggtcaggctggccagtcccgtgtgagtccttgtgtgtgtgctgtgggggcctcgctgtgcctcactgccctccctgtgtgcccgtcgctgtgttgggaaagttgtccccaccagcccatgctgtgagtcccaagtggagtgagtttgtgttgtgggactgtcacagccctcatacacacacctgctagacccctccatccgtcctgtgtgagccctgtccttgctgtgagagccgtcctgtgccccctgtccctcctgtgtgcccatcaccgtatgcacgggaggctctccaggccagccaggacccggtggtgtcatcccccggctgggcgtgtctctgtggggccgtcaccccctccgcatgcacacacacctccactcttctccatctgggtcctaaccccgggtaggctggaggtacagtgggccctggtacttccctgctgacctgctcctcctcccgtgtcccgcaggccccagggagcgccatggcccgcgcacgccaggagggcagctccccggagcccgtagagggcctggcccgcgacggcccgcgccccttcccgctcggccgcctggtgccctcggcagtgtcctgcggcctctgcgagcccggcctggctgccgcccccgccgcccccaccctgctgcccgctgcctacctctgcgcccccaccgccccacccgccgtcaccgccgccctggggggttcccgctggcctgggggtccccgcagccggccccgaggcccgcgcccggacggtgagtgcccgccccgcccccggggtgataggagccgggaagagagagggctggagactcggaggaactggagaagtgggagaggacggggggaggtggcgggcccagccgggccactgggagggtgtggccaatgtggtctttgtgttgcaagaagcaggaagacggaggctgggggtggagggggaggtcaagtgggaagtccctcctggaatctgactgcagtccccgaattgcagcccactgtctcttccgggcctggggcaacagctgcatcccagctcccctcccccagtctgggtcctctagaccccctggaggattcctgttgcagggagagtgggccgagcgggaggactgtcaactctggcctctggggaggggtcgagaggccttttgcttttatttgcatctctttggccaggggctgtcctcagcagtcccggcggaggaaggagagggggaggggccattgtgttgggaagtcccctcggggaggtgggggagtcttggggagggaagggttaaaggtcccctgcctgatgggctgttaaccctgtggtgcccgtggagccccatccctgccggcaggcgctctagggaaagtgtgtcctggtttcccatcccccatcttgtcccggcagcccaaggggagcgaggaaagagaaaacttccctaactcagttcctggaagccctggaaggggacaccgatttcaaggccaaggtcacagatgtggaaactgaggccctggctgtaggccttagggaaccctcaggccaggacctggtgggacgggagggcaggagcctcctagggcgctcagaagtggggggggggggggggcaggaaggcatctcccgcgtcccagccccccaggcccgcgctctgaagctgccacagtctctggccttctggtctctaggcctctgccacatccggaggtgtggcttccctgtggttggacacgagagggcaggagacctgaggcttgtgatctgggtggggtcagtcactgtatccctgtgtgaccttgggatactccctaagggcgggcctcagtttccctgcctgtcacatggaaaaggcaaaatgtggcccctttggaaaatagaggtcgttaagcctgaccacccccggggtcacctctctggccgtctaccttccacactgacaagggccgtggggacgtagctggccagacaggtgaccccagagcggcgtccccaggtacttcttgctttctggtgcctgtggaggagaagctgagaaattgactcactagcgatgggatcactagaaatgaggcggggagcagtggctgggaaagaggggagcaggccgagacacctcgaggcctggaggggtggtgggtgctgaccgcgcccctctgcctctccaaggtcctcagccctcgctctcgctggcggagcagcacctggagtcgcccgtgcccagcgccccgggggctctggcgggcggtcccacccaggcggccccgggagtccgcggggaggaggaacagtgggcccgggagatcggggcccagctgcggcggatggcggacgacctcaacgcacagtacgagcggcgggtgagtgctgggggtggggtagacggcaggtgggacttccgccggaggagggggcggcaggcggcccccgccagatgtgcggcagctgctgccctgcgcggctgggtcgctccgcggacaggcaggtggggggtaagtgggtgggggggaatcgcgcgcccgcagagccgcccaaggactccgcgccgcggctggcatagccggagcccgagccagggccagggccagggccagggactaggccgccgaggagtggagctgcgcgcccgtggcccgcggccgcggggactgagggcggcgctgggcggcgcggctcatatatcccgggctatttatagccggtgagtcagcagccgcgccgcgcccgccccctgccgtccctctcgcgcggcccgcagcgccacacagtttcccgggcgccggggcgggccggggaccgcaggggtgggctcgcagccccgccccgcgggaggccccgccccccagcccctggcacggcctcgattttttaaaacaaatattcgaagcccacagcagagaatgggaaatcacaaacatcatgcgcccaccaggcagctctgttcagtttgaacattacacccgcattgcttgcttattaagaaaccaaacaaaaccgcagaaacgcatgtggtgaagctccttactctccccatcccttccccctccttgcatccaaaggaaatctctcgagttggcctctctcaacccctgcaggtgttgcttttactccgtatttaccaggccagaaccagggcttagaatcatggagcattcttagcttagcgtatatgacatagtttttgtttctccccagaattcctttttccctcaatattaggcttcagattcaccatatgggcaaaagagcttccattcatctatgttcagccaggcacggtggctcactcctgtaatcccagcactttgggaggcggagatagaaggacgcttgagcccaggagttccagaccagcctgggccacataatgagatccccgttgctacaaaaaatacaaaaattagccgggtgtggtggcgcgggcctgtagtctcagctacttgggaggctgaggtgaaagggtcccttgagccaaggaagtcgaggctgcactgagccatgaagggtcactgaactccagcctgggggacagagcaagaccatctcaaaaaagaaacaacaaatacagccattttcggcctggtgcagtggcccacgcctgtaatcccagccctttgggaggcggaggcaagtggctcacttgaggttgggagtttgagaccagtctggccaacatggtgaaacctcgtctctactaaaaatacaaaaattaaggccgggcgtggtggctcatgcctgtaatcccagcactttgggaggctgaggagggcggatcacctgaggtcgggagttcgagacaagcctgaccaacatgaacaaaccccgtctctactaaaaatacaaaattagccaggcgtggtggcacatgcctgtaatctcagctactcgggaggctgaggcaggataattgcttgaaaccgggaggcagaggttgcggtgagccgagatcgtgccattgcactccagcctgggcaacaacagcgaaaatctgtctcaaaaaaaaaaaaagaaacaaaaagtagctgagcatggtggcacacgccagtaatcccagctacttgggagactgaggcaggagaatctcttgaacccaggaggtggaggttgcagtgagccgagatcaggagatcatgccactgcactccagcctggaggacagaatgaaactctgtctcaaaaaaaaaaaaaaaaaaagtcattttcactgctacatagtattctgttggataaacatagtatccttattcattttctcattgatggatatttaggatagatatgtatttttattttatgtttagagacagggtctcactgtctcccaggctggagtgccgtggttcaatcacagctccctgcagcctccaactcctgggtttaagggatcctcccgcctcagcctcccaagtagctgggaccacaggcagatccaccatgcctggctaatttttattttatttttttgtagagatcaggtctttctgtgttacccaggctggtctcaaactcctggcctcaagtgatcctcctgccttggcctcccaaattgctggaattatgggtctgagctacctcacccagactatttttaaatgtatttcagattttattttatttatttattttttgagacagagtttcgctcttgttgcccaggttggagtgcaatggtgcaatctcggcccattgcaaccttcacctcccgggttcaagtgattctcctgcctcagcctcccaagtagctgagattacagatgcctgccaccatgcccagctaatttttgtatttttagtagagacggggtttcactatgttgaccaggctgatcttgaattcccgacctcaggtgatccacccacctcggcctcccaaagtgctgggattacaggtgtaagccactgcgcccggccattatttattgccttttttcctctcccaatcatgcatatttccgggtgcgctcttgtgtttctagagtaggtacctgggtggtctgcccaccatccaccttactaggtgattgctagctttctcaccaggtggcacccacagcagtgtgacagtggtgggttttgtaacttacaccaatccgatgtgccccctttgccaccatctcctggccccaagagttgctagggagtgttgaggaggctgggctggtaccaggcgactcactaccaggtagcatgaggacgatgaggatcatttaaccttctgtaaagtgagtttctccttcccctgcacctgaagggaaggaggttaggtggtccccacttagcacagagcctgcctgtggagctacagggagtggcagaggattgcagctctctgtacacttaaaaaaaattttttttttgacacggagtcttgctctgttgcccaggctggagtgcagtggtgcaatctcggctcactgcaacctccgcctcccgggttcaagcgattctcctgccttggcctccctagtagctgggaatacaggtgtgtgccaccaggcccagctaatttttgttgttttagtagagacggggtttccccatggtggccaggctggtcttgaactcctgacctcaggtgatccacctgccttggcctcccaaagtgctgggattacaggcgtgagccaccttgcccagccatttttttttttttgagatggagtctcgctctgtcacccaggctggagtgcagtggcgccatctcggctcactgcaagctccacctaccgggttcacgccattctcctgcctcagcctccggagtagctgggactacaggcgcccgccaccacacccggctaatttttttgtatttttagtagagatggggtttcactgtgttagccaggatgatctcgatctcctgacctcataatccgcccgcctcggcctcccaaggtgctgggattacaggcgtgagccaccgcacccggcctgtatttttttttttttttttttttgagacagagttttgctcttgcccaggctggagtgcaatggcacgatctcggctcaccgcaacctccacttcccaggttcaagcgattctcctgcctcagccttcccaagtagctgggattacagacatgtgccaccaagtccggctaattttgtatttttagtagagatggggtttctccatgtaggtcaggctggtctcaaactcccgacctcaggtgatccgcctacctcggcctcccaaagtgctgagattacaggcgtgagccaccgcgcccggcctgtatttttaatagagacggggttctaccatgttggccacactggtctcaaactcctgacctcaggtgatcctcccgccttggcctctcaaagtgctgggattacagctataagtcactgcgccgggcctctgtactctttttagtattgcctttaatttttaccagtcgggagcctttcctaggacctagcctcctgcctgcccacttcctaggatgttggagctgagagggtcctagagaccaccttgttttcatcctgccactggagagggggcaggggtttcactcggcgttgcctagaggtgcttctgttgaagcctctgcaatggggggggctcttcccagttctcctccttccacagattgttctagaactgccaagactgtgggcaccctgctcctttctcctcatcttgccagccctgtagggaggggcaggataggttgcagtccatccttcagccccttgggggatgtctttctcaaatgtacaacagagacggggcagtcacagctaatgtgccacgcactcgcttggtgcccagctctctgctgaaggcattccgtgtttgtcctctgcctccaggtctcatgtcctggatgaggatgtgacctccgagacatggacattagcccaggcggggggaggagctggaatagggtgggcgagactgtcgcctcgctgcccctggagctgaccatccccactcccatcaccatactcagtcccctgctaactgccccttctctctcttttccccagagacaagaggagcagcagcggcaccgcccctcaccctggagggtcctgtacaatctcatcatgggactcctgcccttacccaggggccacagagcccccgagatggagcccaattaggtgcctgcacccgcccggtggacgtcagggactcggggggcaggcccctcccacctcctgacaccctggccagcgcgggggactttctctgcaccatgtagcatactggactcccagccctgcctgtcccgggggcgggccggggcagccactccagccccagcccagcctggggtgcactgacggagatgcggactcctgggtccctggccaagaagccaggagagggacggctgatggactcagcatcggaaggtggcggtgaccgagggggtggggactgagccgcccgcctctgccgcccaccaccatctcaggaaaggctgttgtgctggtgcccgttccagctgcaggggtgacactgggaggggggggctctcctctcggtgctccttcactctgggcctggcctcaggcccctggtgcttccccccctcctcctgggagggggcccgtgaagagcaaatgagccaaacgtgaccactagcctcctggagccagagagtggggctcgtttgccggttgctccagcccggcgcccagccatcttccctgagccagccggcgggtggtgggcatgcctgcctcaccttcatcagggggtggccaggaggggcccagactgtgaatcctgtgctctgcccgtgaccgccccccgccccatcaatcccattgcataggtttagagagagcacgtgtgaccactggcattcatttggggggtgggagattttggctgaagccgccccagccttagtccccagggccaagcgctggggggaagacggggagtcagggagggggggaaatctcggaagagggaggagtctgggagtggggagggatggcccagcctgtaagatactgtatatgcgctgctgtagataccggaatgaattttctgtacatgtttggttaattttttttgtacatgatttttgtatgtttccttttcaataaaatcagattggaacagtgga

SEQ ID NO: 29 - DNA, 4693 bp, Homo sapiens
gcggcggcgggcagcagctgcgctgcgactgctctggaaggagaggacggggcacaaaccctgaccatgaccccccacaggctgctgccaccgctgctgctgctgctagctctgctgctcgctgccagcccaggaggcgccttggcgcggtgcccaggctgcgggcaaggggtgcaggcgggttgtccagggggctgcgtggaggaggaggatggggggtcgccagccgagggctgcgcggaagctgagggctgtctcaggagggaggggcaggagtgcggggtctacacccctaactgcgccccaggactgcagtgccatccgcccaaggacgacgaggcgcctttgcgggcgctgctgctcggccgaggccgctgccttccggcccgcgcgcctgctggtgagtccgcgccccgcccctgccccgcccacgtgagacccgcgtcctccaggcagggtcctggggagacgggagtgggtggcccggcaagcctttccgccctggcccttgacgcttccgactttggggggcacatttgtgtgggggagaaggggcaagtgcaggaagctgaggtgcagccaggggacctggtgatacagcagaaggtgtctgcgctctcggccttcttttttgctccatttattttcccttgatggagtgtgcgtgcaggtgggaacttgggggaggcagggggagaaatgggagggttttagggccatcccatgggctccagcaggcccagctcctacaaccctagacggccaagctggggaaaggacccaaatgttgttctcagcttccacttggagaaaaggggaggggaaccccagactctgaaattctgcacacactgagaaatgactcctttcctcctaataccggtgttcgaagcacctaaacaggaggcgtctagaaccgaagaggccccaaatccagggttgtattagacttgagtagggactgagggcaggctagggcgtaggttaggggagaggggagaaagagtaggggaaagagggaatctgccaaatcagggttatgatttaaacctgctcagaatcgttcacccatcctaccccaccctgctccagggaggagagcagaagctgagtcactgggtgggtgggacagaagtgaatcagccgtgaaaacatggggggcagcggggagatggggagggcaggaaatgcaaactgcgcatcccagaggctctgggttccttccacgggaggggatggagaattcacttggagtttctttcagttccaaatgcccgagtgcaggcttctgggcgtcctcctaaaaggtggtctgggtggatgagaggaggcagtttggaactaaatggttgggtgctaaatgtagggaatgaaggagaaggtctggggaggggtgggcatcctgaggaagaaggatcagactcaggattgcaggggaaatgtctcctgggttgtgagtggtagttagctgggagcttgtctttaggcacagaggaagaggatcccttcaggggttctgatatctgattagatgttaggcaaattccaagcagtcagtacatgctcccctttctgccttttcctgtccctgacttatttcctcaccccttcccagtcctgagctctccccggaccctccggaaactttctccagagccaggagcaacctgcaggttggaagcccctcattccttgcaccttcttaatctgccctcagcctatcttggttaagggttgaatccatgtgctcctgggaccactggggttgagctggcctgggtcacagggtaccagaagggagaggttcccactgcagtgccccagaagtaaccacatctcaggcctgggaggggtgggttgagtcatagcaaggtcacagcagggacacacattccttttgggtccctgttggcccccctcctacatccgttgctcttctgccccagctctccggcttcgtgcgcccccttctggcctctggtggaacagccaggtcttttcacccaaagcccaaagccccaaatagtcctttgaatttgttctccattttttcatttattttattatttattgtaattaattgattgatttttaaattagttaattttttaaaattaagtaattagttaattttttaaaattaagtaattaattaattttttaaaattaagtagttaattttttttaattaagtaattaattaattttaaaaagtatttatttattttgagacaaagtctcactctgttgcccaggctggagtacagtggtccagcgtctcactgcaacctccgcccccccgagttcaagcgattctcctgtctcagcctccggagtagctgggactacaggagcctgataccatgccaggctaatttttgtatttttagtggagacggggtttcaccatgttggccaggctggtctcgaacgcctgacctcaagtgatctgcccaccttggcctcccaaagtgctgggatgacaggcatgagccactgcgcccagccaataatttatttatttttgagacagggtctcactcggttgtccaggctgaagtgcagtagcacaatcatggctcactgcagtcttgacttctggggctcaagcagtcctcctgcctcagcctctcaagtagctgggactgcaggtgcacgccaccacacctcggtaattttataaattatttgtagagatgaggttctcattatgttgcccaggctggtctcaaactcctgggctcgagcaatcctcccacctctgcttctcaaagttctgggattacaggcgtgagccattgcacccatcctcattttccatttttgctttccaaaattcatctcctttataagccttaaaaatcagtatgggaaatactggggaatattgtcaggaaaagtaatataactatttgtcagagaaagaaactagggccagcatcatgcaacagcggggcataaggccctcccttccttacttcagcaggtgatgtgggcaaggcccttctccacatggctctgcctgatttctgacctctccttctcctattcctcctccagttgcagaggagaatcctaaggagagtaaaccccaagcaggcactgcccgcccacaggatgtgaaccgcagagaccaacagaggaatccaggcacctctaccacgccctcccagcccaattctgcgggtgtccaagacactgagatggtgcgtttggagctggtagggagcaggaggggtgggaagccctggagacttccatctgagactgctcccttgggcttggagacgtctccattgtctgtcctgggtgcttgcctggtgggccagaaggttggaatggggagctgggctggagcggttctaagctgcctactctcccttccccagggcccatgccgtagacatctggactcagtgctgcagcaactccagactgaggtctaccgaggggctcaaacactctacgtgcccaattgtgaccatcgaggcttctaccggaagcggcaggtgagactatttttcttctcctcctgctccagcagaaggctcctgccagggagtgggggcggtgctgcttacaaagctgcataaataagacactgccccatctttaaggatcttccaactttaggagaacatagagaatataatttattaaacaaacttagagaataatcaaccacacactgtgagagaaaacccacttaaggaatgccctaactcagtggctcttgaacttgaggcatcagaatcctccggagggcttatgccacacagatagctgagccccaccggcagccttcctgattcaggaggtgtggggtggggcctgacaatatgcatttctaacatgttccctcgtgatccggatttgggaacgtcactttgaaaactactgttccaggctagcagaatgcacacaatttattggttgaagagggggaactaaagagagggaacactgggccgggtgcggtgtctcatgcctgtaatcccagcactttgggaggccaaggctggtggatcacgaggtcaggagttcaagatcagcctgaacaacctggtgaaaccccatctgttttaaaaattacaaaaattagccagatgtggtggcatgcacctgtaatcccagctactcaggaggctgaggcaagagaattgcttgaacctgggaggtggaggttgcagtgagcagagatcatgccaatgcattccagccagggcgacagagcgagactccatctcaaaaaaaaaaaaaaaaaaaaaaaaaagagagggaacccccgaggagacgctcaggtgtttttacatcctcagactcagatgtcccctctcattctcctgctggaagcctctggcctcactcctgacctgtgtgcctctctctccagtgccgctcctcccaggggcagcgccgaggtccctgctggtgtgtggatcggatgggcaagtccctgccagggtctccagatggcaatggaagctcctcctgccccactgggagtagcggctaaagctgggggatagaggggctgcagggccactggaaggaacatggagctgtcatcactcaacaaaaaaccgaggccctcaatccaccttcaggccccgccccatgggcccctcaccgctggttggaaagagtgttggtgttggctggggtgtcaataaagctgtgcttggggtcgctg

SEQ ID NO: 30 - DNA, 3019 bp, Homo sapiens
agtcccagctcagagccgcaacctgcacagccatgcccgggcaagaactcaggacggtgaatggctctcagatgctcctggtgttgctggtgctctcgtggctgccgcatgggggcgccctgtctctggccgaggcgagccgcgcaagtttcccgggaccctcagagttgcactccgaagactccagattccgagagttgcggaaacgctacgaggacctgctaaccaggctgcgggccaaccagagctgggaagattcgaacaccgacctcgtcccggcccctgcagtccggatactcacgccagaaggtaagtgaaatcttagagatcccctcccaccccccaagcagcccccatatctaatcagggattcctcatcttgaaaagcccagacctacctttgagcctcagttgccccatctgtgccctgggtaggaatatcctggatccccttgggtctgatggggtagccgatgcctgatttgcacccacaacgtgggaggttataacctgtccccaagttgcaaatggggaaactgaggtacagggatgccagggaccctcctgaatgtgcacagcacctgggaaacccggggacggggtcgggcgtgcggtgtgggcatggtccctgacctgggctggggccaggatccaagagaaacaatgggggtgtggtgcatggatagaagtttgtgatgggcagagccagctggagctggttctgaatctgatgaaatcgcttgtcaaggcactgctaaagtcacatgcaacgagcgacttgttaggggaggaggagagtattttccccatctctgtgccctccatggaggctccaggggtgcagggcactggatgaggtctgggctgtggtgggacccaggagggggcaggcagaggggcacactcttagcccgccctaaacccatctgtgccgtgtgactccggcaaacctctcacccttgctaagcctagcaactaggttaaggcaccctcaaaccccagtctccccagtctccctaacacttgtaccagcctgaggggctgtgattcctagaggctcagtagtctggaatgtgatgggtttggcactcttcatttctcgggattacacctgtaatcccagcactttaggaggccaaggtgggagcatcgctttaggccagaacattgcagcctgggcagtatagcgagaatccatctctaccaaaaatgtttaaaaaaaattagccagacatgatggtgtgtgcctgtagtctcagttattcaggaggctgaggcgggaggagcacttgaatccaggagattgaggctgcactgagccatgagtgccccactgcactccagcctgggtaacagcaagaccataataaataaataaataagtgaagcaagtaagtttttgactgccagaagaaaagcagagccatggttggaatctcaggctgcctgaatatcagatatacattaattccttcaagtatttactaagcacctattgtgtgccaggcacagtgtcaaccaagctaagattctaagtagggaatatgaatgatacacaaggaaataaaatagggtgcttcctattttaggcaggctggaaggaagaggaggagccagccatactgagattcaggagattcaaggggagaaatgcccttttttttttttttttttttttttttgagagggagtcttcctctgttgcccaggctggagtgcagtggcacgatcttggctcactgcaacctccaccgccccgattcaagccattcttctgcctcagcctcccgagtagctgggatcacaggcgccagccaccatgcccagctaatttttggtatttttagtagaagcgggcgtttcaccatattggccacatatcggccaggctggtcttgaactcctgacctcaagtgatccacctgcatcggcctcccaaagtgctgggattacaggcgtgagccaccgcgcccgcacggagaaatgctcttggtaggggaaataacttgtgcaaaggcgccgccgccgtggtgagatccagcttggcgtgttaggggaaatgggcaccctcgttcctggaaaacggtaggcctgtgggtgaccagcttccctatctgtcttcccacagtgcggctgggatccggcggccacctgcacctgcgtatctctcgggccgcccttcccgaggggctccccgaggcctcccgccttcaccgggctctgttccggctgtccccgacggcgtcaaggtcgtgggacgtgacacgaccgctgcggcgtcagctcagccttgcaagaccccaggcgcccgcgctgcacctgcgactgtcgccgccgccgtcgcagtcggaccaactgctggcagaatcttcgtccgcacggccccagctggagttgcacttgcggccgcaagccgccagggggcgccgcagagcgcgtgcgcgcaacggggaccactgtccgctcgggcccgggcgttgctgccgtctgcacacggtccgcgcgtcgctggaagacctgggctgggccgattgggtgctgtcgccacgggaggtgcaagtgaccatgtgcatcggcgcgtgcccgagccagttccgggcggcaaacatgcacgcgcagatcaagacgagcctgcaccgcctgaagcccgacacggtgccagcgccctgctgcgtgcccgccagctacaatcccatggtgctcattcaaaagaccgacaccggggtgtcgctccagacctatgatgacttgttagccaaagactgccactgcatatgagcagtcctggtccttccactgtgcacctgcgcggaggacgcgacctcagttgtcctgccctgtggaatgggctcaaggttcctgagacacccgattcctgcccaaacagctgtatttatataagtctgttatttattattaatttattggggtgaccttcttggggactcgggggctggtctgatggaactgtgtatttatttaaaactctggtgataaaaataaagctgtctgaactgtt

SEQ ID NO: 31 - DNA, 30122 bp, Homo sapiens
cgtcaggggcaggggagggacggcgcaggcgcagaaaagggggcggcggactcggcttgttgtgttgctgcctgagtgccggagacggtcctgctgctgccgcagtcctgccagctgtccgacaatgtcgtcccacctagtcgagccgccgccgcccctgcacaacaacaacaacaactgcgaggaaaatgagcagtctctgcccccgccggccggcctcaacagtgagtgcggggccgaggctctgtgaaggggatgggggaggaggagcagccccggccgccgccaccggcgcggcgcgggaggcgggaggagaaggcagctcattggctcaggcatgggatgtccaggtgactgacagctcccgtcccctgtcaagaggaggggcgcctgccttgctccgggcctctctgttgcctcctggggtcttgggcccggggccgtttgggctcgcggtccgggagcggcgcgggtagcgcggatccccctggtgcggggggtggtccccagcagcggagccgggcggggcggggcgggggcgggcctggggggcggggaggccgggtgggcggagcgggccgcggaggggacgtgggccgggatggggacgtgcggcggggacgccgggggatggacgcgcgggagcggggcggggcgggcggctgccgcgggacgtgtcggggatcaggtgtgcggggctcgcgggcgggcagcgtctggcgggcgcgggagccccccagcgagcattcctttgttgccacacgtttgtcaggaaaattcatttgctcgtctagggttggcttcagtcacgtgtggggtgagaggctgtgccttgcttctcctttttccttttttatttttttattagatttctcgaagttgcccaagtgatttttttttttttaaagcgatgggttgtgcgcccagtaaagctgagagcagcctcctgaaccacccaagattgcacacgtcagggagtctggggccatgcatttaaagaaacggaattaaaaacgcactcgggcagttgaaagttaacggacgaggctgatagacaacccaggccagggtcttttcataacattccgctgcccagacatcttgtcctcagattgttcctagtcgtgagaaccgggagccttcttggaagggttcttgcctaacctttctttaattcaactcttgggaaagaggtaatgggagcagtgagcatatggccagatgaagtcttttcaaaaccacttggatgcttaaaggtcatgcagtatctttcgtaagagggaggtgcttccagtgtggcctgaagattattttagggaagagagtttcagccctcaccaggtagcgatggagtttggagattttaagatggatgctgctgctccaggttttgatgggttaattcccaaaacctttaagtgtcatatattccagaatgtaagatggttatattatttcccacagtaaattaggatgaatgtatgagtctttaaacgttacttgtatcacatattcctatgcaattttaagttatttgcccatgtttagcatactgtcttagattttagaatgggaagaaacttcagagctagctaactgcctcctgttgtttgcctgtagagaaacaggtctagagtaaatggccttgtccaagttcacaaccggctgggagcaaagcagaggttctcatgttcagcctgtctactgctcttttgaggacatttttttttttttttttttttttttgaggtagagtctcgctctgtctacaacctccgcctcccaggttcaagcgattcttctgcctcagcctcccgagtagctgggactacaggtgcctgccacccgcccagctaatttttgtatttttagtagagacgaagtttcgccatgtagctgggattacaggcgcccgacaccaagctaggctaatttttgtattttcagtagagagggggttgttggtctctcaccatgttggccaggctggtctcaaactcctgacctcacgtcatccgcccgcctgggcctcccaaagtgctgggattacaggcttgagccatcgcaccggcttcttttcagtggtgcagaacctcctgctggtgtgtgtgtcttattttgtcagtgtgttattctacctaattgacaaaggtggccaacctttctgtttctttttagtattgtttcttaattgtacagttttcttatgagtgaagatacttggtaggtgtacgtgatttcactgaaagcaaagggattttcatcttcctttgaccctttaacaacaacaacaaaaagggctgagccaggcagggcacgatggctcacacctgtcatcctagcactttgggaggccaaagcgagtggatcacttgaggtcaggagttcgagaccagcctggccaacatggtgagagaacaaccccctctctactgaaaatacaaaaattagcctggcttggtgttgggcgcctgtaatcccagctattcaggcggctgaggcaggagaatcgcttgaatccgggaggcagaggttgcagtgagccgagatcacgccactgcactccagcctgggtgacagagcaagactctgtctcaaaaaaaaaaaggggcgagggcgggggctgagccatatgtcattgtttatcttggtgtctgacagacctatgaggagtttgatgtctttggccagtcggttcctgcttggctgacatcagctcttacagaggtggaagtacactcagcctgcatgggacatcaaaatgttgctttgggacatctgctagatagaaagtattttgtgtgggatagggtgagctttctgaaaagcttttagatattgccatatttaattactcccttcttgcctctcactctgttcgtttttttagctcattacacaacactgtactgaacaaaacaagaagcctcattgaattccttgaagtgatttttgggcaatgggcaaaacaacttattcaggcatctagtactatccaaattgctgataagtcgaaggactttgttgggtaaagttgcacaactgaaaaacaggagaagaaatgtacagattatcttgcgtttgggattttatctttggttcaggggtcaaagcagggtttcaatagcaaattactgaagtatttgaatagtgaagtatttttgtgatttttttttaactttaccgctgtggagagactgttcactttcattaaaaattacagggcaaatacccaaactccttccaagtcaaaaggatgttgtccagtttgttttattgttaagaaaactatcaacttccttaagaatgtttgaataagattcaatagggccgaataaggaaaatcaaagtagtagtgtaaatcgtagtataattcttgttgttgagaagtatagccttttttttcttttcaaattttcttgttcttttttgttttttgttttgttgagacagggtcttgctttgtcacccaaactggagtgcagtggtacagtcatagctcatggcagcttagacctcctgggctcaagtgatcctcctgcctcagcctcccaagtagctaggactgcaggtgtgcacccccacatccagctaattattttatttcttgtagagttcgagtttcactttgtcacccaggctggtcaccggctaacttattttttgtagagatggagttttgctttgttgcccaagctggtcacaaactcttttttttaaatagaaacatcttcaagcacaatgtccttgctttcttgttatgaagagtgctcttaaggccttcatggattgtcactgcctcataataatgttttgaatacctacgtaacttgtatgtaaatacatactgctgcaaaaagaccaacttttcaaaaatttatttatttatttttttatttaagaagaatgccagtaactcttgttggcctggtctggatttcagcatcaggttggcctggtctggattcctttcaataatgaatgaaaagctttgaggaaagaatgtaaatataatgaaatttcaaaagagttacatgtgggccttgaaaagttagggggaaagatgaggagaaatactcttcattctctcctccccttgtcccaaagctcctctcttcttcttcttgcaagaggattgaactagtgattataaaactgtaaagattatacaacatacggcaatgagtataatcacaattattggaccacccttcacagtctattatgttagagaacggagaagcattcacagaagtttctctgaatctcttagtcattcccaaaaacccaaaccagaaaatatctcatgtcattgtatgttatgtacaaattggcataaggaacagctcttagtttgtaaagtcttttagataatggagaaagcttccagcttttagttttcaagcttgatcattaggaggagaattcactctgtggttgttttctactttgtgttgcttggacagcacaaacctcttatctagccttgtttcctttccaagtaaaaagggactttgtgaggattggtagagttagaacactaagaaattctgaggctgtaaatcaggaacaaatcgggtgatgggaaacagacgtgttgttcatctattgaggaagacacatttgcttttttatgtgttactcaaaagattaatatgtagcctcttaatgcctgtgtacataactttctctgtaccactatgtatttccatagatgatatttttgaaagagaattacccttaattaattaaaggaaatctacacttttaaggctgttaatacctattgtcaaattattctccagaatgttcactgaagccctaattgtaataacaaagtattagaaacaaccatctcagtagtagttaaccattgccatttagataatggttaaagtatggtatatctttataaaagatgagatgcaatgcagttgttcaaaagaatgaatgtcagtatatattgatagggaagacatctgaaaaacgacttacagaatatgtcagtatgtgtgtatggtacagttccatttctttataaaaacaaaagcaaaaacagacctatatttcattgacaaaaactctgcaagtctccatgtgaaactgtcaaaagtggctcctttgggagtaggaacgggaggttgggagagatgttaatttttaattttatgtactgatgtttacgttttctaggaacacatttttccagtaaggaatggtttttctatgatatagaatataattgtagtagctaaaactttcttagggacctttcttattgttctgcgtgctatattcatttaatcctcctaacaaagtcttcgaggtagatacagttattatctctattttatagatgagaaaactgaggcacaaagaggttaagtaccctgtgcgagggtaacagctataactgagagtgggagcctggcttcagtctcagcccctgaccacactataccagtgtatcccaagtacaaattgtccgccttaagtagaaatgctttcagttatgattcagggtgtggaggccacagcagagatcacttttactaagcttttctaggtatgtctctttcaggttccaaaagtatatattggattatgattgcttatgtgtttttaatgaagaaaataggatccagacattgatttgaaagtccttcaaaaaagtaaaaaccaggttgggagcagtggctcatacctgtaagcccagcactttgggaggctgaggtgggaggattgctgaagcccaggagtttgagaccaacctgggcaatgtagggagaccctgtctctactaaataaataaataaataaataaataaataaataagtcgggcatggtggcatgtgccctgtagtcccagcttcttgggaggctgaggtgggaggattgcttgggcccaggaatcaaggccgcagtgagctgtgattgtgccactgtactacagcctgggtgacaatgcaagactgtctcaaaagaaaaacaaaagtaaggaccagaaaacctgatattgtttgttacacccttttttctcttcgattgcctacttcaagtgaatattaattgtattttagggaagactgacttccacagagacctatctggaactcctggttccttacctctgcttctgtcagagcagctctgggttttggtttgttactattgtacacattaggcttctatacaagaagaactggtcccattggtttaaaaataagtttgaaaatcctagaaacagtgagagtcagaaaaaaaaactgtttttatatacatattctctcccccaccccctttctctccagttgaaatatgttgcagagctctaaatttagggatgcttttggcgtatttcttatacactccagaggcactcgagataaattatcttcaatgttagatctctcttagctttgctagttgtatttgttaatccattttgagttctctagcctgtgtccattttatgtgtgtatagaatgaggccatggagatgttgtacaactgtgtcgtttggcagcagagtcctaaggaattggtggtgactatgggatggtggtagccactggggctgcctcaaatggaaaggaaagggttctaagtatttataaaagaaaattctagtgtataactgagcatcttctatttaccagcacttgatactactaaatcgtcacagcaccccggtgttattattatctctgtttacaaatgaggaagctgaagctcaggtcacacaggtagacaggaagtgatggggtcagattcccagctaggtctgccttggagctttccttcttgtgagggtgatgttcagttcactctggaactggtgtagccatcgccacatttagagtgcattttagagtttgagccagttttgatgattttacttcaacttactgatggaactccttgttcatccctggaactctctaacacttctgctgggagtttagagggatggccacaccaagctgcttgggtacattttctaaaacaaaatttattgtaagaaatggaaattatgaacaaaatataccactatctctttttgctgtgaagttaagtttattggctactgttaacaatttatttacttacttacttactattcttttgtagagacagggtcttgccatgttccccaggctggtgtcaaactcctggattcaagcaatcctggtgcctcagcctcccaaagtgctgggattacatgtgtgagccactgtacctggcctcaactcttgttaaaattaaagcaccttaatacgtttagcaaactcatcagaccaataaatattttcaagatgtatgcagaattaccagtggcacatcccctttttctgtggctccaccccttcaactttttgtccaagaaaacttttcgtgtttgcctgtagctgatgtgcagttgtttctgctcccaaatcaacagggtttaatgaaaaccctagaaagtagaaacccgtgggagagaaaagaaaaaagacaagttcacaaggtatgtttagtgtataaaaaaggagaaggactagaaagcctgagatacaaaggaaatgaagaaactaatcagtgagatagagataaagcttttttctgaatttttagcattattacctgatttagttaaccagctgcattaattttatgctcctgatttgtgcacaaattgaaatttttgctattggatttaggttccctctctaggagtttctcagttgtttgcactaagtaggatatagttgctaacttacttagatgaccttttatgaaatttgtaggtgatatatttatttcatttctggagcagatacagctgagcagcttaggtagactatgaagaaagtgtgtgtgtatatatacaccaactaaaatgttaaaggtaaatagcctaaaagtagcaatttttttttgaaaagcaacctgagttttcagtagagtgttattataaaccaagctttacccagagagaaattgactgaaaaacacgttttctgagatgttttagagtttgagctgtttctcagttgatggcatgagctatttcaggaacagaactatatagatctttagacttttattacttcttatttattttcttcagaatacttttacatttggtttgaggagagtcagaattcttatctggattcaccatgttcacatctgtgtgcacatgacagatttcagttctgctgtggttaacttatctgacttgtccaacaggttcctgggtggagctacccatgaacagcagcaatggcaatgataatggcaatgggaaaaatggggggctggaacacgtaccatcctcatcctccatccacaatggagacatggagaagattcttttggatgcacaacatgaatcaggacagagtagttccagaggcagttctcactgtgacaggtaagtgagacccatgttttggtggaattcaggaaacaggtgggttacagggctcattcactctaggaaaaatctgtttgcttaaatcttcacttagcaaaatatgcctcctgatatattgtagtataatatatattgcacagatatatattgtgtttatatgagacagctaattgacaggtgcttcagtgcccactgtttttccccagattgtcatttttcttacccagattatattgtttctagcagtttatcagtttaaaattcagtggcataaatgctaatttatagaattaatctgactttcccccattttcctttgtgtccctgtgttacagatcacagactgttcttgaattagttacctctgtatatatgtgtcttcccttctagatgttgacgttgcaaagggcaggggccatgtttaatttttattaccttcacagtaatggtgctggcacgtagtagacactcagtaaatgtttgattcataggaactgcaggttgcttcacgttatagcaatatttgcacagttggaagcaccaaccaaggtctgtaaagatagttttgaagtctcctctgctttctcaggggatgttttgtttcagacctcatttttctatatttgagctgaagaaactaattacatggattaaggactgcttatggtgaaagagtaagaatacaacgagatatgtgtgtggaatgaaaccaggtcattattttttagtataaacttttctgtttttttttttttttttcagaagggctagatattaaatgacatttaagaaattcttgtttcagtgacagctacactgttagcattatggggcactggatgaccttctgggtggttgttaactgatgttaaccatttagaaaatgcaaatgcacgggaagcagattaaggaaatgtaaacagtgactatttttaggaatgcagtatggatatgtttcttcttaacatttttgtattttgtaaaaattgtgtatattgcacatattattacttatcagaagaagtgaaaaaaaggagaaatgagttaaatcatgtccaacttcctgagtggcttatgatccactaatgttgccaaggcagcgggggactggtttgttggctctgtggcacactgtgcacccccgccacccccgtgtcatccctgacttgtccctgtgcttcttagagcctgggatggctcttgtcataagcggaaccagagcagatggctctcttctgaacagcttgcccttgattccagtagctacagcattagtctgtctttccgaatgaagatttatatttatattatggaacttgctgatgggtttctcaagttttctgcttgttatggcctgtcaacaaggctttcactctgcgttcaggtgtgtgggccttgatcattgataccatggtgtccatgagcctgttgttcacatggtgctgtcaatgagcagagaacagtcacctgcttacctgtctgttcatcttacttcatttatggtgcagttttacgtgtgactgaatatgccttcaccctcctatgatcatgtttaagtttaggttgccatgaggaggcatggcaaatgcttttgaacactttcgtacccctcatcttatgtctctccaggccctagattagtggtcatctttcagagaatggctagaactcgagtcttctgggatagcctactaacacgctttaccattgaggagtgtcttcaaaactcacatcatctgaattgccatgcgtctctatatgtgaaaagtaattggaaagtgtttcttgtagggggaaatgttttagggttgttgggtatcagtcctagagctgatttatgtatattttcaacttaaaaattattccatagaaatatttgtgttgccgcaggggttgttagctgggaaccccagtgtgttctgctttgcctttcaccctgtcacaggggttttcaccttgacggcacactagattcacccagaagcttttaaaaatggcagcacatggactgcatctcaagaacttctcattttggttgacaggggcagggtagagacgtcacaatattttaaaagctccccagccgattctaatatgtgccatgggtgaagctctaatgcattccaaattgttaggaggagtaaacagtttagagaagaggttggtaccagtgtgaagaagcatatagaagcagagcaatgcttccataggattcttgactttgtcaccctgactgccttgacctggtcacggctatgtaaggctgacccttaacttgatgtgtagctgtgaacccaacagttatgagcacaaagatagtaaactgaggccagtaggagtgcccagttcgggttgactcctgtgctagttcaagacaaaaatttcctaaatatatatgacgttggtttgatacagaaccagcttttctgttttcctgtccccatttaaaaatctcctatgtcaattatactagtctaaaagactcctaggcctaatctgtctgataaatttctgacgatcttatttctgagtcagtctcaccaacgtctctatacattaattaacattatatacatactcttgataactttaatagttaatatctattcttttcagcaagttaagccccaaatattttttatttctattttagattttgggggagggtttgtgtatgtagtgaaggatccccagtgactttcagtttttatacaagaaatcattaataaagctaagaaattaacttagcacattctgttcatctcttgtatcaagtgcagtttgtgatcatgttgtttttgtctaaaaacttatttgtaaatttttacagttctaagaatgtattttgtgcaatcataaaggttttatattaatatataagttatataattcactctgaaatatctcaaagcaaatatttctgaaataagtaaaatagtggttctcaaagtttttggtcattacatacctttacattcttaaaaatcattagggaccccaaaaaacttgtttgtgggtttatatattttgatatttactatattagaaattaaaactgagaaaatatatattcattcaaaaataatacattttaacataagtagcattttttagtgaaaatacctattttctataaaccctccaagttaataagaatagtggcattgttttacacatttacaaatctctaataccaagcttaatagaagacagctggttctcatctgtgtttgcattctaactgttgtgctatcacacatcatgtagcctttggaaaattccactatacacatgggagaatgagaatgaaaaaggcaaataaatcctactagtattgagaaaggaactgtaacctcaaagaccctctgaaagcgtctttgagaactaccttatgcactttgagaactactggtgaattatttaatgatgagggaactttgagaaaaagaactctgaagttcctgaatttgaagattattttacctttagtggacaaaagagtaaatataagagaatgtgacagtttgtgtctgtagatagtatttcctttgcaaatttatcattttgaaggatttcattactactgaaaaagtgcagaacattttgggagtaagaatgctcaatttcatttagccttttaatatcacataaatttttcttgtatagggttatgatatattctctgatttgctttttcaaagccatactgctgtaacttttaattttctaatttctagtagagactaagtcatttgacaaagtgagaattaaaactaatagctgaattccttctcttctagcccttcgccacaagaagatgggcagatcatgtttgatgtggaaatgcacaccagcagggaccatagctctcaggtgtgtcggggggattctgatttacagtaaacaattaagaaagatgtaaattctctaagtatattttgctaaaataaatgtgaagacttttaggaatagtttgaagctattattgagtttctgattttggaatttatttaggatgatatagttcttgtcgcactcctttacaactaaggattttgggccctgtcactctaaacgaattggaaaattcttgtccataataaatcatgccaatactccaggctagtttcttgagtgtataagtagaaaaagactgagatagatgctttaagaccacagaatagggaggagccaagatggctgaataggaacagctccggtctacagctcccagcatgagcgacgcagaagacgggtgatttctgcatttccatctgaggtaccgggttcatctcactagggagtgccagacagtgggcgcaggccagtgggtgcgcgcaccgtgcgcgagccgaagcagggcgaggcattgcctcacctgggaagcgcaaggggtcagggagttccctttccgagtcaaagaaaggggtgacggacgcacctggaaaatcgggtcactcccacccgaatattgtgcttttcagaccggcttaaaaaacggcgcaccacgagactatatcccacacctggctcggagggtcctatgcccacggaatctcgctgattgctagcacagcagtctgagatcaaactgcaaggcggcagcgaggctgggggaggggcgcccgccattgcccaggcttgcttaggtaaacagagcagccgggaagctcgaactgggtggagcccaccacagctcaaggaggcctgcctgcctctgtaggctccacctctgggggcagggcacagacaaacaaaaagacagcagtaacctctgcagacttaaatgtccctgtctgacagctttgaagagagcagtggttctcccagcacgcagctggagatctgagaacgggcagactgcctcctcaagtgggtccctgacccctgacccccgagcagcctaactgggaggcaccccccagcaggggcacactgacacctcacacggcagggtattccaacagacctgcagctgagggtcctgtctgttagaaggaaaactaacaaacagaaaggacatccacaccgaaaacccatctgtacatcaccatcatcaaagaccaaaagtagataaaaccacaaagatggggaaaaaacagaacagaaaaactggaaactctaaaacacagagcgcctctcctcctccaaaggaacgcagttcctcaccagcaacggaacaaagctggatggagaatgattttgacgagctgagagaagaaggcttcagacgatcaaattagagtgagctacgggaggacattcaaaccaaaggcaaagaagttgaaaactgaaaaaaatttagaagaatgtataactagaataaccaatacagagaagtgcttaaaggagctgatggagctgaaaaccaaggctcgagaactacgtgaagaatgcagaagcctcaggagccgatgcgatcaactggaagaaagggtatcagcaatggaagatgaaatgaatgaaatgaagcaagaagggaagtttagagaaaaaagaataaaaagaaatgagcaaagcctccaagaaatatgggactatgtgaaaagaccaaatctacgtctgattggtgtacctgaaagtgatgcggagaatggaaccaagttggaaaacactctgcaggatattatccaggagaacttccccaatctagcaaggcaggccaacgttcagattcaggaaatacagagaacgccacaaagatactcctcgagaagagcaactccaagacacataattgtcagattcaccaaagttgaaatgaaggaaaaaatgttaagggcagccagagagaaaggtcgggttaccctcaaagggaagcccatcagactaacagcggatctcttggcagaaaccctacaagccagaagagagtgggggccaatattcaacattcttaaagaaaagaattttcaacccagaatttcatatccagccaaactaagcttcataagtgaaggagaaataaaatactttacagacaagcaaatgctgaccgattttgtcaccaccaggcctgccctaaaagagctcctgaaggaagcgctaaacatggaaaggaacaaccggtaccagctgctgcaaaatcatgccaaaatgtaaagaccatcgagactaggaagaaactgcatcaactaacgagcaaaatcaccagctaacatcataatgacaggatcaaattcacacataacaatattaactttaaatgtaagtggactaaattctgcaattaaaagacacagactggcaaattggataaagagtcaagacccatcagtgtgctgtattcaggaaacccatctcacgtgcagagacacacataggctcaaaataaaaggatggaggaagatctaccaagcaaatggaaaacaaaaaaaggcaggggttgcaatcctagtctctgataaaacagactttaaaccaacaaagatcaaaagagacaaagaaggccattacataatggtaaagggatcaattcaacaagaggagctaactatcctaaatatatatgcacccaatacaggagcacccagattcataaagcaagtcctgagtgacctacaaagagacttagactcccacacattaataatgggagactttaacaccccactgtcaatattagacagatcaacaagacagaaagtcaacaaggatacccaggaattgaactcagctctgcaccaagcagacctaatagacgtctacagaactctccaccccaaatcaacagaatatacatttttttcagcaccacaccacacctattccaaaattgaccacatagttggaagtaaagctctcctcagcaaatgtaaaagaacagaaattataacaaactatctctcagaccacagtgcaatcaaactagaactcaggattaagaatctcactcaaagccgctcaactacatggaaactgaacaacctgctcctgaatgactactgggtacataacgaaatgaaggcagaaataaagatgttctttgaaaccaacgagaacaaagacacaacataccagaatctctgggacgcattcaaagcagtgtgtagagggaaatttatagcactaaatgcccacaagagaaagcaggaaagatccaaaattgacaccctagcatcacaattaaaagaactagaaaagcaagagcaaacacattcaaaagctagcagaaggcaagaaataactaaaatcagagcagaactgaaggaaatagagacacaaaaaacccttcaaaaaatcaatgaatccaggagctggttttttgaaaggatcaacaaaattgatagaccgctagcaagactaataaagaaaaaaagagagaagaatcaaatagacaaaaaatgatactacaaacacctctacgcaaataaactagaaaatctggaagaaatggatacattcctcgacacatacactctcccaagactaaaccaggaagaagttgaatctctgaatagaccaataacaggagctgaaattgtggcaataatcaatagtttaccaaccaagaagagtccaggaccagatggattcacagccgaattctaccagaggtacaaggaggaactggtaccattccttctgaaactattccaatcaatagaaaaagagggaatcctctgtaactcattttatgaggccagcatcattctgataccaaagccgggcagagacacaaccaaaaaagagaattttagaccaatatccttgatgaacattgatgcaaaaatcctcaataaaatactggcaaaccgaatccagcagcacatcaaaaagcttatccaccatgatcaagtgggcttcatccctgggatgcaaggctggttcaatatacacaaatcaataaatgtaatccagcatataaacagagccaaagacaaaaaccacatgattatctcaatagatgcagaaaaagcctttgacaaaattcaacaacccttcatgctaaaaactctcaataaattaggtattgatgggacgtatttcaaaataataagagctatctatgacaaacccacagccaatatcatactgaatgggcaaaaactggaagcattccctttgaaaactggcacaagacagggatgccctctctcaccgctcctattcaacatagtgttggaagttctggccagggcaatcaggcaggagaaggaaataaagggtattcaattaggaaaagaggaagtcaaattgtccctgtttgcagatgacatgattgtttatctagaaaaccccattttctcagcccaaaatctccttaagctgataagcaacttcagcaaagtctcaggatacaaaatcaatgtacaaaaatcacaagcattcctatacaccaacaagagacaaacagccaaatcatgagtgaactcccattcacaattgcttcaaagagaataaaatacctaggaatccaacttacaagggatgtgaaggacctcttcaaggagaactacaaaccactgctcaaggaaataaaagaggatacaaagaaatggaagaacattccatgctcatgggtaggaagaatcaatatcgtgaaaatggccatactgcccaagataatttacagattcagtgccatccccatcaagctaccaatgactttcttcacagaattggaaaaaactactttaaagttcatatggaaccaaaaaagagcctgcatcgccaagtcaatcctaagccaaaagaacaaagctggaggcatcacactacctgacttcaaactataccacaaggctacagtaaccaaaacagcatggtactggtaccaaaacatagatatagatcaatggaacagaacagagccctcagaaataacgccgcttacctacaactatctgatctttgacaaacctgagaaaaacaagcaatggggaaaggattccctatttaataaatggtgctgggaaaactggctagccatatgtagaaagctgaaactggatcccttccttacaccttatacaaaaatcaattcaagatggattaaagatttaaacgttagacctaaaaccataaaaaccctagaagaaaacctaggcattaccattcaggacataggcgtgggcaaggacttcatgtccaaaacaccaaaagcaatggcaaccaaagccaaaattgacaaatgggatctaattaaactaaagagcttctacacagcaaaagaaactaccatcagagtgaacaggcaacctacaacatgggagaaaattttcgcaacctactcatctgacaaagggctaatatccagaatctacaatgaactcaaacaaatttacaagaaaaaaacaaacaaccccatcaaaaagtgggcgaaggacatgaacagacacttctcaaaagaagacagttatgcagccaaaaaacacatgaaaaaatgctcatcatcactggccatcagagaaatgcaaatcaaaaccactatgagatgtcatctcacaccagttagaatggcaatcattaaaaagtcaggaaacaacaggtgctggagaggatgtggagaaataggaacacttttacactgttggtgggactgtaaactagttcaaccattgtggaagtcagtgtggcgattcctcaggtatctagaactagaaataccatttgacccagccatcccattactgggtatatacccaaatgactataaatcatgctgctataaagacacatgcacacgtatgtttattgcggcattattcacgatagcaaagacttggaaccaacccaaatgtccaacaatgatagactggattaagaaaatgtggcacatatacaccatggaatactatgcagccataaaaaatgatgagttcatgtcctttgtagggacatggatgaaattggaaaccatcattctcagtaaactatcgcaagaacaaaaaaccaaacaccgcatattctcactcataggtgggaattgaacaatgagatcacatggacacaggaaggggaatatcacactctggggactgtggtggggagcggggaggggggaaggatagcattgggagatatacctaatgctagatgacgagttagtgggtgcagcacaccagcatggcacatgtatacatatgtaactaacctgcacaatgtgcacatgtaccctaaaacttaaattaaaaaaaaaaaacaaaaaaaaaaacctaccagtggaggtacaaaataaaaaaaaaaaaaaagaccacagaataaatgaagatgaaggttgtattagaactagacatgaagacttttttttgcatctgaaatcaaagcagtggcttttgagataaattttaaatttatctaaattatgcaggattccttcaagataaatattgtttactaggagttgacaatgttggaaacatagatggatatagtattaaaatcttacaaatgtttgtgttataagacttaaaatatggtaagtatataactgtggctaatgatttagaatactcatagccagcctttaactttattgatatgtaagatcacctaaaagtgtcattagagtacaaattcttgaggacgggaaccattatctttttctcctgtatttagggtgcttgaaaaatgtttaatgaacctttgaatgagtcgcaacaaaaaccttgttttgtcgggttctcactattctgtgtcctgggcactagaaatattttgtgtgtcttagatccacccagtattctttctgtttccaaaggccacagaattcctctatactttactatgctctatttttgcttttctctgaaatgtcgaaaatctttggattcaacacaaatttattttatgatgatgagctttatactgtagagaagctcacaatagcaggctgtcgtatataagatgatctgactggagcatttgaattgctggcttatgtatgtcagtttggccacatgcagtaagctatagctgatgtagaagaaagcttacaaagtctccatagcagaaagtgtaccacggaatccaggagagaaatcgaattctttgccgtggtctttcctgaggaggatttcttcaatctatatcaccttttatacagaaagctttaagtttagattagcattttccaaaatgtgttttcaagaacatttgttcaaaggtcaaataaatggaaggtaatgcagccccaggttcccccacactctcaccttagtagtcgcatgagtaattctgaccagttcctgcagtaaagaaattatagtttaagctggacatggtggcacttgcctgtagtctcagctacttgggaggtggaggtgggaggatcccttgagccccacaagtttttgagtccagcctgggcaacatagcaagactctctgtctctaaaaaaaagaaaaaaagaaatgggtttaattaaaccaaatgtttcccaagcttatttgaccttagactttcttcctcttctctgcatacgtttttcccttaagaacttaataactccgtggagcactgtggtaagtgctttcctggctcatggagttgcagatgtgcaatcaggcttaactcaatattgaatgtacatggaattctagagttgaatgcatctaccctggaattccaaaggaatttttgaaattcaggaaagaaaatgtcaggtttttggcctttggtaggtttgccagtgttgatcccttctcaggaccaaatccctaaaagagcataggctatcatcaagaggaggtacttactttatgttgacaatcagatcggtcagtttcaacaaagggaagagtttggaaagacagcctaacccctgtgagagataacagttgagtaggacttaataagggagctgtcagcaggtatagtttaaactttcaaaaacctttgacattgcctttttttaatggaagaaacaataatttaaaaattaatttctttaggatttgggaaaattgattttcttcctgaataagaagaaagtttagggttaggaaacttaaaaaagcagttaaaggactgttattgtacttgatcttatagaatgtttttatatgtgtttataaggactatatataattttcaagcttttctaagatgaggaagtaaagtcactaacattaactagatatgttctaggtactcagtttctttttttttttttttggagacagcgtctcagggtcttgctttgtcacccaggctggagtgtagtggtgcagttgtagctcaccacagacttcgattcccggctcaagcaatctttctgcctcagtctccctagtagctgggactacaggctcacactgccacgcctggctacttttttattttttttttgtatagacagagtctcgctatattgcccaggccgttttcaaactcctggcctcaaatgatcctcccatgtcggcctcccaaagtgctggaattacagacatgagttactactcccacctctcttttaatgttctcaatccagtgaaagcaatgatattatccccatggaccagtggaaaaagtgaggctttgtactaattacttatctaagatcacaaagcaagtcactgttagagccaggattcaaagcaggtctgagtctgtggcccttgttctttctactgaactaagtaaatgaattcgattgataacaggagagctcacaaagccatgagaatgaactgaaaaatgtctgctgagttatggtatggggaatctgcctaaggcagtgtgcacttaggaaaaagaccatgaaactgcttttcggatgatcatcctcaagagtctcagttttgtatcagaaaacagactgtagattgtttcttcacttgatcttagccaaaagtccgagaagcgatatagattatttattgaagacatttttgcattgtgtttctgggaccaaaaatgccagcacaatgttgagtgttactgaaaaatgatccaaacagaaaatatcctccatttcctgtcttgtaaaactgtgatttttatctgtacatgaatcatggtatacagcttaatatccatatttagaggacagagtgaccttgaggtaaaccagagaaggaaaacttaagtgatcagaaaacaaagaactccatgtgagagaacaggctagaacgatcagaatcttctttgtttttgttttttgtttttgagatggacctcactctgtcaccaggctggagtgcagtggcatcggctcactgcaacctctgtttccaggtggttctgctgcctcagctgcccaagaagctgggattacaggtgtgcaccacaacgcctggctaatttttgtatttttagtagagacagggtttcgccgtgctggccaggctggtctcaaactcctaacctcaagtgatccgtccacctcggcctccctaagtgctgggattacaggcatgagccatggtgcccagccagaatcttctttgaatagatgtaggtatagagagaggattattgattttaaaagcacaaatcttacgtaattagattaagtacatttttaccatattctggaattctaagaattggaaggcagtttaaaacctgaaagtggcaaatttaagattaataaaaggaagcacagagtggtagtgaatgaggaaagcttaccactcttattcttaaagtattgtaagttgggaaacttatggagttcttttttgttttgttttctttttaaaacacttgtccagagataactttgcttcattcaactgagaaaattccatcctcatgaaaaaaaaaattagagcgtgaaatcttactgcgtttcattctgtcagaaattatgaaatattaacttgttaaatctttgagcaggtttaaagaaagatctgtgaggccaaagcaggaaactaaacagaagcgacctgcagtgtgttgagtatagtcagatattgtgtgtacaggaactgatgtgcaagtaaattgtaacagtttattgtttttgatttgggatgatttcagtgttactccaaagagccaactcatgattctgagtaatctcaatagccaatggaaggagcttaatcctaaatgctacattgtgtcattcagtggaatttgccaagttcagcagaactagataagattggtactaacaagagcagcagaacgcacaggggttttactttgccctgtctgaagctccttcctggggtagctgtttcacagagaactagacctgtcaagagtcatgtgaatatgtcagactctgcatttcttagctacctactgaaaagaatgacagctttggtcattcttttgagtgaatcctagtcaaacaaaataaaatgtcaaaatgcttcttagttttgagacccctgggtttgggatcatagcatgacatcccttaaaactgactatgaccaggcacggtggctcacgcctgtaatctcaacactttgggaggctgaggcgtgtagatcacttgaggtcaggagttcgagaccagcctggccaacatggtgaaaccccgtctctacgaaaaatataaaaatttgccaggtgtagtgccaggcgcctgtaatcccagctactctggaagctgaggcaggagaattgctagaacccaggaggcagaggttgcagtgagccaaggtcgcgccactgcactccagcctgggtgacagagcgagactccgtctcaaaaagaaaactgaataaataatactgaataaataaatatcatttttaggactttttcattccttttggttctattaaaaggggagctattggaaatgttaattgttcttggcctgaaactttaggttataataagcaatttttaaaagtcacattttttattttatttgatatgacacatgttaaattctgactcaacttattatagattattcccaaaaacttttggctaacatagtttcgaaaccttggaaaatgtttgtatagcaatttgtcctaaaaatataatctccttccagagagtaaaccctggtgcttaacagtagggcctctctatacagtattcctgggtttgaatactggccctgctatgtactggttgtggaaccttaggcaagttatttaatctatgtctcagtctcctcatctgtaaaatgggattttaataattatttttatagggttatttgttgcaaggtgaaagttaatgcatgtggctgggtgcagtgtctcacacctgtaatcccagcactttgggaggctgaggcagggaagatcccttgagcccgggagttcaagaccaggctgggcaacatagtgaaacactgtctctttaaagaaatacaaaaattagctgggcgtggtggcacacacctgtagtcccagctacttgggaggttgaggtgggagaattaattgagcccaggagttcgaggctgcagtaagctgtgattgcactctggcctgggtgacacaggagaccctgtctccagaaaaaaaaaaaaaatgcatgtaacatgcttggaataatatttgcccctttaagtgctcaataaatactattatttatttcctcatcacatctctcacttatttttgttttacttctcatcattttatttttagcatatccttttatttccttttatttttttaattatgaaatttttttttttcttttttttgttgagatggaatctcactctatcacccaggctggagtgtagtggctggatctcggctccacctcccaggctcaagcaacctccacctcccaggctcaagcgattcttctgcctcagcctctcaagtagctgggattacaggtgcccgccaccatgcccggctaatttttttttgttttgttttgttttgttttttgaggcggagtctcgctctttcccccaggcaggagtgtagtggcgcgatctctgctcactgcaagctccgcctcctgggttcacgccattctcctgcctcagcctcccgagtagctgggactacaggtgcccgccatcacgcccagctaatttttttgtatttttagtagacacagggtttcactgtgttagccaggatggtctcgatctcctgaccttgtgatccgctcacctcggcctcccaaagtgctgggattacaggcgtgagccaccgcacccagcgtgtaagttttgtgtttttttttagtaaagacggggttttaccatgttggccaggctggtctccagcttctgacctcaagtgatccgcctgcctcagcctcccaaagtgctgggattataggcatgagccactgcacccggcctaattacgaaaattttaagtgcatacaagagagaataatataatggacctccatgtaagtattgcccagatttaactcttatcgaggtttttcatacttcccttagcattacatcccaaagtacagtcttatgcagttcctgtgctgtgcttagatatcccaacagtgaagctcactcaggttgttctgaagatattacatactctgatcttacattatttttcagcattttttagaaaagcaacatgtttgttatctaaaatttctgagacacaaccttatgagtttggtatcttttctgtctagatttttctttgtattaggaggaattggtcttcctttttttcttaaagtttgaattcttctttacagtcagaagaagaagttgtagaaggagagaaggaagtcgaggctttgaagaaaagtgcggactgggtatcagactggtccagtagacccgaaaacattccacccaagtgagttctcacatgtttcttgtcagtggacacagttgatctgcgcacgcttacaggcaatgggcctggtaatccccacgatattttcagcaaatgacatctgcctctgaatttctttctcagggagttccacttcagacaccctaaacgttctgtgtctttaagcatgaggaaaagtggagccatgaagaaagggggtattttctccgcagaatttctgaaggtgttcattccatctctcttcctttctcatgttttggctttggggctagggtaagtaccggtcaactcctgaagttttttccattcattttatcctcttattttcagattgaagaaatgtatgtgaaagcagtttttattgctttactttcaatgttttagtgcaaataaggtgaacttaaaaaagtgggtgcacaattgttctacaaataagcatttttaataatagtagagtgtgttttcttatttgaaaataagatgtttggcctggtgtggtggctcatgccagtaatcccagcactttgggaggccaagatgggtggatgacctgaggccaggagttcaagaccagcctggccaacatggtgaaacccggtctctactaaaaatacaaaaattagctggccatggtggtacatgcctgtggtcccagctacttgggaggctgaggcaggagaatcgcttgaacatgggaggcggaaattgcagtgagccgagatcatgccactgcactccagcctgggggatagagtgagactccatctcggaaaaaaaaaaaaaaaaaagaagatgttcataataatcccctaaatgatcaaatgtaagcggactcctctgtgattgatttttctttttgggttttgttgtgtaatatttaatcttgagtaatttatgaactaaactaatctttagcatgtacattttgtggtcagtgcaaatacctttttttcatatgggaaaatacatgattacattgaatagttttttttaatgaaactggtaggttgattggtgctaattttttccttttttaactttgtagtattttcatttattttgctaaaatcaacctcatatttacgtgtaattcattagtttcttagccacatcttttaaataaattgctttttttccttgatttaaacaattgaggaattacacttctgaaagattttaggagttaaacagtagctgttaatttttttcaagacgtatgttgtgctctaagcatgcccagtgggtcattttcagtataagatatgcagaagatggggtcatcctttttcttccctttaaggagctcagcatattggagagagattcttagtcacgacctcagaaacttgcatacagctttccacacacccgtcttgtctctcttgggtgcttgatctgcttttgtgagggcaaggacagtaatcaacaaacagcaacctagaaggggtttgtgcagaaggggactgtgtgactgttgcgtgggggttgatgtggggcaggtgtaggagtttaatacattgctgcctatacagcagttcattgcccttaagcgattggtgtctataccttgccgtctctctttcagtcatcttcagattgtttgtcttggctgtaagtataactattgctatagatgaatgtaaaaagagtgtttaaaaagttcgttgctttaattgcactggaggtgaagctagttacatactttccttaacttcccttctgcttttgctgttgaagaggccaaatactttcttggcatgaaaaagtattataaggcccctaatccttaggagttattagtaagagctgtctttaaagcactggcagcttttaaggttttttttttcttttgtcctacatagagcaccagaataatttcacatattactatatttttgtgtctgaaatgtcagtagaaccttctgtccaccaaagaggaacatcttgaaggagttgggctgctttatttactctgtggagggatctgttctctctggctttactttgtctaatcactacccctttgctgtcgagccccgatatttaatgagtaaacaaactcatataaaaccagtttggccgggctggtgactggttttaagaaagtcagtgatgatttcacggtgtttggggagcggtacccacaaacctttagagccttttacaaagactgaagagttttaagtagagttcaacctgtggacaagctggtatagaactgttgaaacaggtgaaacatgatgcttctgcttcctttcagcatctatattggaaagcgactgagcacaccctctgccagcacctactgagggaaaggaaaagcccctggaaatgcgtgtgacctgtgaagtggtgtattgtcacagtagcttatttgaacttgagaccattgtaagcatgacccaacctaccaccctgtttttacatatccaattccagtaactctcaaattcaatattttattcaaactctgttgaggcattttactaaccttataccctttttggcctgaagacattttagaatttcctaacagagtttactgttgtttagaaatttgcaagggcttcttttccgcaaatgccaccagcagattataattttgtcagcaatgctattatctctaattagtgccaccagactagacctgtatcattcatggtataaattttactcttgcaacataactaccatctctctcttaaaacgagatcaggttagcaaatgatgtaaaagaagctttattgtctagttgttttttttcccccaagacaaaggcaagtttccctaagtttgagttgatagttattaaaaagaaaacaaaacaaaaaaaaaaggcaaggcacaacaaaaaaatatcctgggcaataaaaaaaatattttaaaccagctttggagccacttttttgtctaagcctcctaatagcgtcttttaatttataggaggcaaactgtataaatgataggtatgaaatagaataagaagtaaaatacatcagcagattttcatactagtatgttgtaatgctgtcttttctatggtgtagaatctttctttctgataaggaacgtctcaggcttagaaatatatgaaattgctttttgagatttttgcgtgtgtgtttgatattttttacgataattagctgcatgtgaatttttcatgaccttctttacattttttattttttatttctttatttttttttctctaagaagaggctttggaatgagttccaatttgtgatgttaatacaggcttcttgttttaggaagcatcacctatactctgaagcctttaaactctgaagagaattgtttcagagttattccaagcacttgtgcaacttggaaaaacagacttgggttgtgggaacagttgacagcgttctgaaaagatgccatttgtttccttctgatctctcactgaataatgtttactgtacagtcttcccaaggtgattcctgcgactgcaggcactggtcattttctcatgtagctgtcttttcagttatggtaaactcttaaagttcagaacactcaacagattccttcagtgatatacttgttcgttcatttctaaaatgtgaagctttaggaccaaattgttagaaagcatcaggatgaccagttatctcgagtagattttcttggatttcagaacatctagcatgactctgaaggataccacatgttttatatataaataattactgtttatgatatagacattgatattgactatttagagaaccgttgttaattttaaaactagcaatctataaagtgcaccaggtcaacttgaataaaaacactatgacagacaggtttgccagtttgcagaaactaactcttttctcacatcaacatttgtaaaattgatgtgttatagtggaaaataacatatagattaaacaaaatttttatcttttttcaagaatatagctggctatctttaagaaagatgatatatcctagttttgaaagtaattttcttttttctttctagcatttgatgtctaaataattttggacatctttttcctagaccatgtttctgtcttactcttaaacctggtaacacttgatttgccttctataacctatttatttcaagtgttcatatttgaatttctttgggaagaaagtaaatctgatggctcactgatttttgaaaagcctgaataaaattggaaagactggaaagttaggagaactgactagctaaactgctacagtatgcaatttctattacaattggtattacaggggggaaaagtaaaattacactttacctgaaagtgacttcttacagctagtgcattgtgctctttccaagttcagcagcagttctatcagtggtgccactgaaactgggtatatttatgatttctttcagcgttaaaaagaaacatagtgttgccctttttcttaaagcatcagtgaaattatggaaaattacttaaaacgtgaatacatcatcacagtagaatttattatgagagcatgtagtatgtatctgtagccctaacacatgggatgaacgttttactgctacacccagatttgtgttgaacgaaaacattgtggtttggaaaggagaattcaacaattaatagttgaaattgtgaggttaatgtttaaaaagctttacacctgtttacaatttggggacaaaaaggcaggcttcatttttcatatgtttgatgaaaactggctcaagatgtttgtaaatagaatcaagagcaaaactgcacaaacttgcacattggaaagtgcaacaagttcccgtgattgcagtaaaaatatttactattctaaaaaaatgagaattgaagacttagccagtcagataagttttttcatgaacccgttgtggaaattattggaattaactgagccaaagtgattatgcattcttcatctattttagttagcactttgtatcgttatatacagtttacaatacatgtataacttgtagctataaacattttgtgccattaaagctctcacaaaacttt

SEQ ID NO: 32 - DNA, 23651 bp, Homo sapiens
gacagaagcaatggccgaggcagaagacaagccgaggtgctggtgaccctgggcgtctgagtggatgattggggctgctgcgctcagaggcctgcctccctgccttccaatgcatataaccccacaccccagccaatgaagacgagaggcagcgtgaacaaagtcatttagaaagcccccgaggaagtgtaaacaaaagagaaagcatgaatggagtgcctgagagacaagtgtgtcctgtactgcccccacctttagctgggccagcaactgcccggccctgcttctccccacctactcactggtgatctttttttttttacttttttttcccttttcttttccattctcttttcttattttctttcaaggcaaggcaaggattttgattttgggacccagccatggtccttctgcttcttctttaaaatacccactttctccccatcgccaagcggcgtttggcaatatcagatatccactctatttatttttacctaaggaaaaactccagctcccttcccactcccagctgccttgccacccctcccagccctctgcttgccctccacctggcctgctgggagtcagagcccagcaaaacctgtttagacacatggacaagaatcccagcgctacaaggcacacagtccgcttcttcgtcctcagggttgccagcgcttcctggaagtcctgaagctctcgcagtgcagtgagttcatgcaccttcttgccaagcctcagtctttgggatctggggaggccgcctggttttcctccctccttctgcacgtctgctggggtctcttcctctccaggccttgccgtccccctggcctctcttcccagctcacacatgaagatgcacttgcaaagggctctggtggtcctggccctgctgaactttgccacggtcagcctctctctgtccacttgcaccaccttggacttcggccacatcaagaagaagagggtggaagccattaggggacagatcttgagcaagctcaggctcaccagcccccctgagccaacggtgatgacccacgtcccctatcaggtcctggccctttacaacagcacccgggagctgctggaggagatgcatggggagagggaggaaggctgcacccaggaaaacaccgagtcggaatactatgccaaagaaatccataaattcgacatgatccaggggctggcggagcacagtaagtccaaattctcgctggggtgtctgctctggagggtctgaactggagctgggagctctgcagaggggggcctagtgctggccacacagcagggtgccccaggattcaccagcaccaaggctcaggatgtgcgatgctcctccgttggggctggggaggtgggtggggaaggagatagagccattctgttaagagccggcgcttctgggaggccaggagccctggagctgagtggcttgctgaattcacatcacatccttgactgattttaatttggaattacattgtgctgtccagggaaacatatgtattcttgcacatgcgatcgtatcagtaactgtaagcatctgggtgccataaaggggaaggccggctctgtcaggagcccttacggttctcagtgtggagacctcatcttctccctgcttttcacaactcattgtgacacgtctccgtttcagtttttccagttcttgggaagaagaatacctgccccaaattaatgtctgtcaagctttttgaagcccaggcaggagacagcttcttgctgcctgggccctttggtctaccccacccacgtgacccacgagacccacgtgagctgtgtgtgtggaaggaagagggtatgcacgaatgttcccagggccgtgtactttagggtgacatgcagtcttgtgcagtagacagattcatgtgctcaaaatgggcgccctccaggccggtgggcacggggagagcgggttttggctgtggatgcgtagaggaggctggcgccctttgtgtctgcgtgtcacgggagagcgggtggaggggtggcagtgggtgcatggtgggggggggggatatgtctgggagcctgccgtcccaggaggctctgtctgcatggaggagccgggcggcttctgggcgagatgtctgtgtgtgttggtacacgtgtggaagtcatatgtgtttactgaaggggattttaaaaacctcaatacaagagagagaaatttggcagatgttgagaaactgacagcccaggaaagaggaatgtgagccactcgtgggccgtagactccgggagcagctctgtttgcttttcctaccagcaggtgtcctcgccgccctgactacctcagcccaggcccacctgggaggtgggcagctcctggagtggggtggagggcatgggatggagctggcaggcaggggagggtggtcagcagagcacacagcaaggggtgaaaggaacctggctggagagaaggaacaggagtgggtaccgatgggtggaccagctctggctggaggtgcaaaggccccgttcacggctccacgccaggcagaggagcctgtggttactggcgaggggttcccgctccagcttcctgtggctgcctggagcgcctttcttcaggatgtggctgccatgtggggcggaggctggaggccgatgcagagctactactccctgcccagggtctctgggtggggctggctcagagacccacagttcccagaggcacctagcagctcgatggccaaggctccaactccctgggaacccaccaacgcgggagatagtgaccacaagcatcagaggaaggtcgaaatctgaggccggcaggagaggtgtgaggagagtccagggcaagagggcaggactcagaccttcatggtctgggtcagcaggaggagtccaagggaggaagcattctgagtcaccaggacccccccatcccggaatcctgagctgagaatgaatgagccacgtggaggcaaggccatgcaggtgcaagtggacactgattttgtgcagactcaaagcacaaatagcagatgtccttgggaaaagcccgggcagggccccatagatgctgggcagcttccaggctgcagtaccaagaccttacaactgcaacagatgggtggatgtggggttatggagcaatggtctggcctggggcaacccagcacagtgagcaggatgctgttcaggatgctggggaggagccaacgtgcgatgctatgaggctcacaggtacaaaccggaagcaggcagactctgcagctgttggaggtgacttggaggctgagcagacggacctgggcccgccctgcagctggtcgggtgctgagcccaccccagagaggcagacacacaaggcacactaactataaagaaggcagtgggcaggtgctgagcaggagcagagagccatcatcaggggcttgcaaggcggcggggcggggtgggggaaggaagcctgtctttaactcatgagggcagacaggggtgacaccaggtctgtggtggggcacagcagggtctcaatgccagagcctctgctgggaggtcatgagatcacgttctgttccatatttcctcacttctggccacttccctgacccagtgaacatgcattcaaaggaaagtgacagtaggagccagggcaaggagatagaggtccctggagaggaaaatgaaagaggaaatactttttagtagtgcaggagaaagggcaccaaggtgagagcagagaggaaggccttttcctaaataaccttttctccctgttttacagataaggaaactgagacctggattgcttaagtaatttgtccaaaaagagcagggaccctaacctagacattctgtgtgcaggacgcatgtagttaagcactcatttatatgtaaaatacacgttgtaagtgttacctttaacctcctttaacctttagggttcagtagaactttgatttataacataaatgaatcatgtgttggaccaagcaggagaggtcagagttattatcttagtaacccaggtggcagattgcacaatgataactggatttgttcttccttagctctgcatttttttttttttttttttgcccgggagattcatactgccacaaatgttctccctaatttaatgaaggagttttctttatttaatgaagagtctcaagcaggttaagcaaccgcagctacgtaaaagtgacctctctgagcctcagtttccccagctgtaaagttagagatgatttccaaactccttttcagctgaaagaattttataattccatctgggatgaatcagcagagcctctattggggagtatgggcaagactctgtaatcctttttctaattctccaggattttactgtcgggagggagtagagagtttctctgaccccatgtgatgggaaaggacacagcttttttacttccgttgtcatccctcttacaaaggtatcaccaatgtaggtgtcattttatcttctggcttgtaattatctgtctctgttcggagacttgttgttttcagccaagggcagcgctaagacaaccagcaaacccagagtttctcagcaaagagaaaactctatattttagtctttgttctctagctgctaagtgtagattttgtttattctgagaattattctgaaaatcatttgctccaagggccaatgccctctgcacagtagaggtcagcacttctccaagtgtggtccagaggaagctggaggtaaatgtagattccctggtcccacccacccttatagaatcagaatcttgagggggtggagtcttggggaacctgtattttcgacaagctccttatggattcttaagcacattgaagcttaagagtcagtgaactagggcgaaacttttcttagagggatggcaaacacaagtgcctacagagacccggcaggaaatgcaaatgatctggaagaaaagccacggcgtcatgataaactgcaccaggacacttggtcttggggtcaagaagaaagtagggtgtgtgagacagggagagggaggggacctggagcccacgtgcccagccaaagcagcagccagcctcagttcttgctgggttttgcattgaggactgtgggtccagcttgattagttcttcccgtgtcccagaaaagcagaaaatctggatctttctgtgaagtgttccaatttttaacatgggcttaaaatgtttatgggcttctaactcaaaatttttaaaggtgttccatcagcgaaacaacatgtctaattcatttaacggttaatcaatagaaagctcacaccattaaagcagtggtttctcaaacttccagaacatctagaagccatggtgccctttgcaacacattataatctgtggttctcaaccctggctgcacgttagaatcatctggagatcttgaaaaaaatatgccgtggaccccactcactccagtgtagtcagaactgctggggaatgggtccaggaatcatttgtttttaaagctttccaggtgattctaatgtgcagccagggtagagaagtacagccacactgataaatatagtcccttcactagaaccagcagaaatgatatatacaagcaaaggcacacctagccacccaggtgtctgaacacattttaaaaggcagttaactaaacatggtcagctatttcctggtttttccatgcatactgtacatgaatattctttgcttatgttttgccccgttaaacaaaatagagaaaatggcattcaccaatatatattttttctgtgcaatggaaaaagttgctcaagatttaatttgtaaaggtgggaccccctagtccagctctcaataatactagtgttctgtgaggcatggcttaagaaccacaaactcgtttgcagtgggtcattgtctgaggcataggttgacactctaggcccatttagtggaatcttgccatattttgttgatgaaaccatcttcaccagatgatctcccagatccctcccagcttgaagagtctctgcttcaataaatgaggtatgttcagaagacctgggttcaaaccccacctccaccaccttctagttatgtgaccttgggaaagacatttaactttttgaggctcagttttctcatttgtcaagtgataaattttacatgttttcattcttctcaggggttgttagaaggtcacatgaagtaataaaaactcgacaaaacaaggtggtgctattacattttgcttatttatgtatacgatgattcattccacagattacttaaaacatcattattcagtgaatttgattgtcaagaagattgtatgtacattttctttgatctcccaggcaattcttttttttaattaattttaattttaatttttttgacagagtctcactctgtcacccagcctggagtgcactggtgcaatctcggctcactgtagcttctgccttctgggttcaagtgattctcatgcctcagcctcccgagtagctggggttacaggtgcccaccaccacacccagctaatttttgtatttggagtagagatggggttttgccatgttggccaggctggtctcgaactcctgacctccagtgatccacctgcctcggcctcccaaagtgctgggattacaggcatgagccactgttctcggcctttaaaatttttaattttaaataatagggataggtcctccctatgttgtccaggctgatcttgaactcctgggctcaagcaatcctcccgcctcagcctcccgagtagctgaaataacagacatgtgctaccatgcccagctaattttcgtattttttatagagatggggtttcaccatgttggccaggctggtctcaaacacctgagctcaagcaatccacccacctcagcctcccaaggtgctggctgggattacaggcgtgagccaccatgcctggctgccaattcttcttcttcttcttctttttttttttttttttgagatggagtctcactctgttgcccaggctggagtgcagtgacacaatctcagctcactgcaacctcgacctcccaggttcaagtgactctcctgcctcagcctcctgaatagctaggattacaagcatgcaccatcatgcctggctaatttttgtatttttagtagagacggggtttcaccttgttgcccaggtgccaattcttttttaatcactagcaattgtgtcctaagctttgcttgctagtgtcaagttgcttgtgtcagctaacttctgagtgactctggccaagaccctctagacagccatttcttcctctgaagagggttgcgccacatgactcctgatgtcccttctaatcatgggaaatctatatatcccagtaatagaaaaatgacctttcccacctctttcttgaaaccttaaaattctccccaggatgtgttcatcctggggagcagattatgattgataggctggaagaaaccaaagaggacggccactagggtgtcctgagaactctcttagctcataactttccccatctcctggcttcccactgccttgacccactctgactgtctcaccagcaagtgccattttccatctcccttcttttttttctgagatggagtctcactctgttgcccaggttggagtgcaatggcaccacctcagctcattgcaacctctgcctcctgggttcaagcgattctcctgcctcaacctcctcagtagctgggattacaggcacgcaccaccaggcctggctaattttcatatttttagtagagacagggtttcaccatgttggtcaggctggtctcaaactcctgatgtcgtgatctgcccacctcggcttcccgaagtgctgggattacaggcgtgagccaccgtgcccggccccatctcccttctttttacagcaaggtgcatgttgcactgacttaccctttattcctcttgtagtcactggagctgtgttatttatttactttattaatttatttatttacttgaaacagagtctccctctgttgcccaggctggagtgcagtggcacaatcctggctcactgcaatctggacctcccgagctcaagtgatcctcccagcaggtgctattgtaactgaagccatatcaataacagctccttcaaaacccagctctgttgtccttgatagggttgccaatgcaagtagcttatccacattcagagtattacaaacttgtaaacttacacattacttaactatcactgatttctctccttggttctatctgaaatggtttagggaatcgttggcagtatctgttctttcaaagccaattattaatcagggcttcattagacagcattcacacatttgttttcctaacatctgttccattaattttctaagaaccagcgtcaggcccaccagatggcaatttccagaaacactcactcatcctttcctgaagatcagtagcgcatttgcttgtttccaggcctctgatccttcctgccttgtctgtgacttcctcaacaacccctcggggtgattataagctcattccagccatgtccattatgtgtggaatctgggtctatgagcttgaatttcaacttcgggctattgttaccatttgtgcagaaagtttttctctgggtgttaatactgctcagaccttgaggctgtcaagtgtacaggagcagagaaaagacaggctctttctctttctctggctcagaggggtgggaaagagcattcgctgcccacatcttgtggacagggatgaagaggccagcaggtgacagcgtctggcatagcacgtgctgtcaaggaaagagaaaggagccaatggtgacacaccagcttggtcagaggaagcatctgtgtttctgccaggctcatgatgtgggctctttgctatataagccctgctttattgggtctaaaacacaaggttgagatgtcactgcactgctcaaacactttcagtgactccctactgttaatgggttaaaatttaaccttttagtctgacaggtggaccccaatctatcatcttgccctttctcacctggctcccacctgctgtttcgggcccctcttactcatttgcatttcctcccctccctgcctttgcttccagcagtcactccatgtaacatttctttcctccccatcctcaaatcctctcaattttcaccccttccgtgaagtgctccttgccatttccctcctttgatttcctgcagcaactcctggacttctctgaaaaccactggtttcctgtcgctcccctcacctgtgctcctgcattgtgacatcttccggggcactctgtcctattatttctctctagtcctgttatttgggcccatgtattaatacccccccttagatattaacccataagcctgaggctgcacttttttgaattttgaaatcagaccttggccttgaccttgagcagcaggatataaataactcttacatgcttagcgttccaataatggaacaccaggcataaatgggttttaatccccttgaaggcaggggttgtgtctactcatgttttgcttcccaaggttagcactatgcttggcatatagtagctgctcaatacatctttgataaatgaatgaatgcccagatgaacaaacacacgaataaatcaactagctgtaagatatgtaaactactaggtgctgatatctttctagaatcagtattttctcaaaaagtaggaaaaacgggttggaaaacttaccagaactgagatgtcaaggcagtgggaggagggggcaattagatttgactggccagtctagtgccatgttgtggagctctgaggccacactgctccttgctcaggactgtgtgtgattctagggccaccaagaatcttcctcgtatctccaccttgcggtctgaggcctcaagcctctagggaggtggcaggcgggacggtggccacttggtgcctgtccgttggcagcacactgttcctgcatgtctcgctcatgctgtgccctctgctctgctttatctcctagacgaactggctgtctgccctaaaggaattacctccaaggttttccgcttcaatgtgtcctcagtggagaaaaatagaaccaacctattccgagcagaattccgggtcttgcgggtgcccaaccccagctctaagcggaatgagcagaggatcgagctcttccaggtaactcctctctcagagcagaaaccacaccgacgggaaagctggttcctttgccatatcagggcaccactgggtgcagcgtttggcagacctgggtttgaatcctggcttctctgagccttcgtttccgtatctgtgtctgtcattaaaacacttaagagttagctaaggtgctcgagggccatggcattcaggaaccactggtttcctatcgctccctcacctgtgctctgcattgtgacatcttctggggcactctgtcctggtctcgggtactcactcctttctctgccctgtagatccttcggccagatgagcacattgccaaacagcgctatatcggtggcaagaatctgcccacacggggcactgccgagtggctgtcctttgatgtcactgacactgtgcgtgagtggctgttgagaagaggtaggtggacccttcagataagcatttcagaatgaacctcaggtcccttagtcctccatgaaatggagggaagaggacagaattaagggagtcagagatctgggttcaaaccctagctttgccactgagtatcctccattcattcactcaactaatgtttattaaatgctcactgtaagacaggccctggggatgcagccacagggataggaactatgagaaatagaaagagggcaatgtgacaatgagtgggtggagtccaacagggaaggtctctatgatgaagaaattcatgcattgacatctgaatgataaggatttagcccatgaagatcagaataagggatgtgctaagcaaaggcaacagggaggcccaggccctcaagtggaaataagcttgatttgttctagcagcagcagcaaacagatcggtgtggctggagcatggtgagctggggaggggaagaggaggggaggtggtcagggaggttgctggggccatataatttattattactattattattattattattattattattattattattattattatttcttgagactgagtctcgctctgttgcctaagctggagtgcagtggtgcgatctctgctcactgcacctccaccatctgggttcaagcgattctcacgtctcagtctcctgaatagctgggactacaggtgcacgctgccacacctggctaatttttttgtatttttagtaaagatggggtttcaccatgttggccaggctggtctcgaactcctgacctcaagtgatccgcccactttggcttccaaaagtgctgggattatagatgtgagccagcatgcccagccaatttaatttagaacatcatcaggtcatggcgaggtttcaggacttattccaggtgtgatgagaagtgtgggagtgctataaccagagctggggatactcaagatacccaggaattccttcctgtccctctactgggtgtgaagtcaagagcctaggagaacccacgtggatctgccaacggcagctctgttgggaattctgactcagacagctacagggaggaggggctgggtgaggtgatttgattgacatctttaaaagatccctctagtttccaggaggtcaagggaagaggcaggaaaatgagttaggagccacggcggcagcccagatgagagcaatatctaggccgagactagggcggtagcagtggatatgacgatcagatggatttgttctgtattttgaaggtagccagtagcacaggctgattaggtatgggatgtgaggacacaagagcattccagataacttctaaattttttcgacatccaggtggtatcacttattgaaatagggggcctaggagaagaacaggttctgttctgcccagttaagtttaaaaggccgggtcgtcatgcaagtagagctatcctggaggcatatcaaacttcacatgtcccaaatatcttacccacacactgccttcacctggaaaatcaggcaatggttcctcctctatgtatgcctcacagagctgttttaaggatcaaatgtatttgagagaacttcatggtttttaccatgttttacaagagtaagcttttcttattttagataaggaaacaggccgagagaagttaagtgacttgaccgaggtcgtccagtctggattagaactttggtgtctcatgacaccatcctctgtgtttctttcccttttcttggctggtactgcctggtctgatgctcagtgggttggggtcacagatggcagtcccatctgttccttctcttcctcttgggcaaggttttctcctgtcatcagctgctataaagccacagaccatccacatattgatgcccagagtccctgaggcaggtggatccttctaagtccttggtgttttaggcaactaagagttaaagctcaaaggcagagcttacaaactatttggcctgcacattgttttcgatttgactagtcatcaacagttttgggtgttttaagtcaggagatttcacataaaacctggacttcttgctgtttttgaaaaatcgaaagatttcctgataaccatccgtcagagatgagtaccggccaccccttgagatggggtatgcatcctcagtccccgcagcccccaccattccctattgttccccaagagtgaggctggcagttcctgtttagcatcatgtgctggctcgattttctcacttacgtgacctgcctgggctcggtagccatcgagtttgcattgcttgatgccacggagcccaggcaagtcacataaatgagaaaattccccatccaaggggaattatccagtggctgagttggcagatggtgggctgaagatcctgccccagtcccaagggtacccaggaatttcatcctgtccctcctactgagcatgaaggcaagagcctaggagaacccacgtggatctgccgacagcagctctgttgggaattctgactcagacggctacagaaaggaggggctggggaaattaatctcttaacttccctgtctgattttgatcagctccacctggatttctttgaagccctgggcacttgaaggagttcttattttcacagctgcagaactcaatgagaagtttgcattgagaatgatttccatcctcctgagacatcaaaaagataatttcgtaataaaacctatgggtcccccacccaccacccccacagctgccaattctgaggttagttcttcattggaaccttcagttcacacttaggcagatactgcccacctttcccacaggggaatcatcacacaggtttgtacttacagagagcccatgagtctcttcagagttcatggcttcaaaccaggcaacaaaggactccaaattggagcagttggcggtgtagattgatgagaaaactgagtcacacatgtggtcttggattcattcagcaaacatctgagagcccttgtgcaccaggtacccaggctgcattctgggtcgcagagtgggttggagtccacaagggccgctggggacccaggtctcatacccttgtgctattgctcatatagtctgcagcacctagctaggcagggccaggcctcccctagtaggctggggagggagcctctcagcatcatggctcaggaaaggtgggacactgggaaacaaccatcttgcatgttggtgaatgtgtgggcatcttccttggtggtctctgttgccccctctttacccctccttgtctctaacaagagtttgggatctggcatcaagctgtcagtgcttgaatcctggcactactatccactggttggatatcttgggcaagctgtttaatctccctaagcctcagtgttcttatctgtacaatgggggataatagttcttgctctatgggattattatagagatagaataagttagtgattgttgtcatcatctctaagtcctctatctggatacagcctgttggccaagccaggccaccctcttgtgcttacatcctggaccctcactctccccaacacagctgtctgcaccttgactttctaactcacagaatcatggaactcactcactccaggtctcttccagcctgccttgaaccagcttgaccaggaggtacactgtgttgttaggtagcccatttcagctactttggctcctccttccagctgccttaacccagggagagggcaatcctcatacctccctctccattcacttctcctccagctgggtctcagctgccttgttttattggtctgccttccctcactgagcgaacctgctggaacagagatcttcaagctcagcaggcgcagtgtgcctcagaggttgccctgacttagggtagagcagatctggttaggctctggagtttatggaagaaaggagctgggttttaaccagtaggactgggatgtccaagccaacctaatgttgatgggaatctccagtcttgtaggcttgtatccttctgtctatgagaaggttgctgggccaggttggactttttggggtttgccctgatggcacaatttcaggaagactccaggttgtctccaaggccagatgctcacacacatggtgtgtggcctcagggagcagcaaatcaatcaactcatcgagaggctgaccctgaatccagagaggtccatcccccatgacctctcctacacctggccacaactggctgctatcccaggatcaacagagcttcccaaattaagtcttacccaccagaattgacatgataccagatcctacctggttttctgtgtaaaactacttgtctcagtgcagacttttcattttctttctttttccttcacttcactcaacctcatttactgagttcctgcttccttgattttggttgccaaaacatgtgatcccacaactactaggcgaatgggctggagttgcccttcacgcaccagaatgtcaggcaccaaaccctggcacctccaggcttcatcatgctcactgtctccgtgctcaagtcatctggaccctcagccatagttctctatcatctcctctgtgctgttttctaagttcacaactgtcttcccaagctgttcatcttggtgagcaatccacattccaacttcccatcatggtgaacaaggattcccaaagaagaaatgtccaagtaatttttacctcgttgtgtccttgttccttaggaaaaatatggcccagtgtaaccgtgatcttcatcttatctcttctagaatctgccactttgtctaggcccacagtcatggccctggtagaaatgcttgcatcttccactgagacggattctgcttcctgtttgcaagtgaccttgcctctagcattggttcctgacttgaatctttttgccagcattacatcctgtggctttttgaatttgtggccttttgaatcacagtctctgtgctcggagactctttagttactccctgtccgtagtctcttccagtccctctgcctcttgccctgatccttctgcagtagattggctcaacgatcccctctcccaaaaaccatgtagatggcatgagtttttgctttccttactgtatctgtgtacttttgcctccaagtaggtaggtgacaattttctcttaataccatcctttcaaagggaatgattattccacttctgtttcatgatggccactagtgtatgcccccatttggtgattcataatacaacaggaatacctggaatgtggcaacgtgcgcttgaaggtccactctgagctctggaggcactttctgtctcctgtgaccctcaatagaactcagttcctatgagtccctataggagcagaggccctggctcacccttgcatgggtggtgggcacacttccccatcacacagaggtgcttttctcactaattctgtcttattttgcagagtccaacttaggtctagaaatcagcattcactgtccatgtcacacctttcagcccaatggagatatcctggaaaacattcacgaggtgatggaaatcaaattcaaaggtaacaaaatgaatgtgtatggtaggatgggtgagtgggggggaagttaatgggacaggatagtgcaggagacccttaccagacctcaagaaaagaaaccaagctccttcagagagatagccgactattttgtacttgagtaattctgctttgccccaaaagcaatgagtgtaactttcagtttatagcttagagaatgcattagcctctggaagacaacacgtactggtaagtggtgaaactgtgtaggcaagccatctagcctctggtcctagtgaaatgggatgagagttcctctttcacagtgttgtcaggcaattaaatgagataatgaataaggaacacagtgccagaaatgctcaacagataggacttgtcttcctcctccctaaaagaaattaagtttggctgtcctgaacatgagtgcccagacaactgagctttccagatgtgcagggcctacctgaccttgcccaggggtcctctgggtttggatgattgcttcgagcctcagggtgtttgtccccggggtgtttgggtagagatggcgaagtcgttgagagtcatttctggttttccattatgtttgcaaggaactcagccttgatgatctctggagttcagggaagttctcttttcctttcatattcccattttgggtaactgcggaacgcctgaggtcagaggcttgtctgggaaaaggtgcaggcctcttttggctcagcgctggacagtgatcttaccccacatgggctctattttacagccttttcttaaagccaaagatttgacactgtaaccacagaaccttagagcccagaggacctttggagtccttacctacaggccagcttaggatgaaaccttcccatttcagtgaatacttatcttgttcataaagattttcagaaaaagggatttgtgatccaggtctctcatttatcttacagatctggtgccccttcctgagacccgagccactcctgtagctatgtaaattaattcctcatgttcctgtcctcagtgaggatggacaacagttggcagctgtccttcgcaaaatcgatctccatttagttgagactctttctaagtcagtctccagtcttttccttttttttcagatgaaacgggttgatgaatttagattttctttccagagcttatttgctatttatcatatgcttcattatctcatctgaattttatagtgaaaacacttcaaagactctaagtgcaatgtgaatgttaacaattatacagtcttgtttctttggctcccattcaggctatcttaagttgtgacaccttaaatttttggtaggacttctgcgttatcttggtccattcacattttaagaggaaactcacaccccaagattctaagtctagaatctaaagtgacaatccagggctgggtgcagtggctcacacctgtaatcttagcactctgggaggccgaggtgggcggatcacttgaggtcaggagttcgagaccagcctggccaacatggtgaaaccctgtctctactaaaaatacaaaaatagctgggcatggtggcatgcacctgtaatcccagctacttgggaggctgaggcaggagaatctcttgaaccccggaggcagaggttgcagtgagccaagatggggccactgcactccagcctggccaacagagcgagactctgtctcaaaacaaacaaacaaacaaataaacaagccgacaacccggagatatgtgttaggtacccacttagtaacagggatgcttcataggtccatgaagattcctaggaatctcagcaagggctttctgccccttggaagatttctatacaagggtatggggatctgaacacggggcatctttcagtgggcatccttacaataataatgagttcttttgatactggcttctccatctgctcttcccctttctgcacctggacatcagaattaagctgcacttgtcccccacacctccctcgcagactgcactgcccctcctcctgggcagtgatggggcgtgtggaggaggcagcctccaagggctctgctctcttcagacaggagattgtcactttccttcccttcttcaggcgtggacaatgaggatgaccatggccgtggagatctggggcgcctcaagaagcagaaggatcaccacaaccctcatctaatcctcatgatgattcccccacaccggctcgacaacccgggccaggggggtcagaggaagaagcgggctttggacaccaattactgcttccggtgagactgggcccacatgggaaccaacatctactgcctgcctactgcccaatggctaggtcaggccccagagccaagccacactcaacagagggtccctgatgctattcacaaacatctccaggaagaagactgaaaatctctcacagagattttctctgtgaaatctctttctgttttcctgggagtcccactgtttttccataggctaactctggaaggagctggctgaagtaaatgaggaaaactctgtgaggaggagtgttgctaaaatagtttggattggagaggcttggtcaaagcctctccatgatttccatgttttaagcacttgtagagtgtatgtgtgagattaatgtaggagtttccattaaagaagtgctcagttagttccctatgaagggtccaaggatgctactggatggaggcaaatagaatggtctccatttgaacggaaagttggagctagagaaattaacaaatgaattcagaaattactgggtagccacaatagagagatagaaaagacccagcttctcttactcaggagcagtttcactgctcatttataaagggaggataaagtatgcatgccaactactaaaagggagaagatgatcacgcccatgagagggtccgaaggattaagtgctttaactgggagcaatgagttcacctatggacacaggaaaggcttcagaagggtgtggaatttgagcagaggcttcaaggatgaggtttggggatgaagggatccaggaggggaagcactgcaggtaaaggaaggagcatgagtgagtgagtccatctggcctcagaggatgccgaaatgaagctggggagaacgaattgggaaatatttagatctggaaaccatgtcttatgaggatggttgggcttgggaaactagggatgttcagttgggggaacagctcaacagcaaggtataggagaggcaaggtagttgccacaaaggctggcatgtagatttatttattccatcagttaggaacaaatcagttaggaacgaatcagttatcagttaggaacgaatcagttaggaacgaatgatcttggccagtgactttaatcatagtgatttcttgttcacaagaggcctgtagcagcagggttagggtgggctggctgcttaatgatgccaccgaagactcaggctttctctctttccagtctgccatgcttagtatgttggcttttcatccttttccttatggtcacaagtgattgctagggcttcaggcaccttgtccacatttaagacaagaaggaatgagggaaggggaagagccagaagctttcttcttccatctgtcacttttataaataatcgaatatctttgccagaacttgcccttaccccctgcatacttctccttgtctgatgggtcattactgggtcacatgaccaccgctactctcaagggaggacaggaaaaggagcatctggtgttttcgactctgtaatgggatgtcacaagggagaagggagttaggaatggttattgaatagataaccaatggtgtctgccatggttcacccttggaacccacaagaagccagattttggctaatagctgcctttggaagtagcaagttctaagtctcagcagatattaaagcagaggctagctgtccacttggcaagcggtattattgccaaatgatctctgtaggcaacagaattgaaggggcctgataatcacatttgggtgatctgttgaaccacggttctaatagaaggatatgccttatttggctaaatggcctttggattgagtctcagcagtcacctactatagtagtcaagctgcataaacttagaattgatttctgtctgggtgcacattaggagggtaaaaataaaaccaacctcaacaaagctgagttggctaataacattcagtgcttggttttatgtggagcgcttcatagcactgctttgtattgtgatagaaaagggtgcagggccacctttgcctctttactcttcctcatgcagcatttatctctgtttcttacatccttgggatcctggtctttaacacatgaatgtgcctttctggtttcttctgccccatgcccttgaacctgggattccattgatcagagccacctatgatggcatgaaaggactccaagggagaatatgagagcattcatgaagtttcttttattggtggttttaagttgattttctataaatgttttttgttgtagcaacttggaggagaactgctgtgtgcgccccctctacattgacttccgacaggatctgggctggaagtgggtccatgaacctaagggctactatgccaacttctgctcaggcccttgcccatacctccgcagtgcagacacaacccacagcacggtatggagcaggctcatgccatctgaggcactggggctgaccgaccagaccacttgttaaaaagaatgagtgaaggattgaatgttgagtgagcaaatgatggtctggggtgagtaaaattcctctggtgaaggttctgatcttggcaccctgactcagttctactcagtcacattctgcccttttaaattcctaccatagtttcaaccagctttttaatttgctttgtccaaagctctctgtaccgtagaaattaattaactgccacgtgttaccctatgtcagagatatgtgcatgtggctggcaaggaacactgaagtagaaaggcttctatcagaactctgatcattccagcctctcgaatgtagaaaacttactctgaaagacaacaacaaggatggacaagaagctaatttgaaatgctaggaacagaaagtgagatagccgagagtccacaacccctgaaactagtctgtctttcccttgaggggaatcaaaaatagggcagtaatttgtgaagcatgtttccttctagctcattgtttctgcatcctgtctggggccctgcacgctgcacttactaaatggctcaaggcaatgttttgtgagaacatttctcaccgaagtgatcagttccagctaggaagagcaatgtaagtgttttcttaaaagccaagataggccgggcacggtggctcacgcctgtaatcccagcactctgggaggccaaggcgggtggatcacaaggtcaggagttcgagaccagcctggccaacatggtgaaaccctgtctctaccaaaaatgtaaaaaattagccgggtgtggtggcacgcgcttgtaatcccagctacttgggaggctgaggcaggagaatcgcttgaacccaggaggcggaagttgcagtgagccaagattgcaccactgcacttcagcctgggtgaaagagtgagactctgactcaaaaaaaaaaaaaaaaaaaaaaaaaaaaagccaagataattcgttatcagtgtagtaactgtcatatgcttcaactcatcaccccaaacaagtgcagttgttctgcttctgtcattgtggatgaacagcaactacacaactactcactcacccaaaccaggttccaacagtttttttttttttcttttttttgagacagactcactctgtggctcaggctggagtgcggtggcactatttctgcttactgcaacctctgcttcctggattcaggtgatcctcccacctcagcctcccaagtagctgggattacaggcgcctgccaccacagccagctaatttttttgtatttttagtagagatggggtttcaccatgctggccaggctggtctcaaactcctgacctgaagtgatctgcctgcctctgcctcccaagtcctgggactacagctgtgagccactgcacccggcccccaacagttcctcttaaagagcacccgtggccattctagcacttgctcagcttctgggactgcccctggaactgggcgacttcctgggttccaggcctgagacttggccttccaacctctcactgacatgtcccttcccaggtgctgggactgtacaacactctgaaccctgaagcatctgcctcgccttgctgcgtgccccaggacctggagcccctgaccatcctgtactatgttgggaggacccccaaagtggagcagctctccaacatggtggtgaagtcttgtaaatgtagctgagaccccacgtgcgacagagagaggggagagagaaccaccactgcctgactgcccgctcctcgggaaacacacaagcaacaaacctcactgagaggcctggagcccacaaccttcggctccgggcaaatggctgagatggaggtttccttttggaacatttctttcttgctggctctgagaatcacggtggtaaagaaagtgtgggtttggttagaggaaggctgaactcttcagaacacacagactttctgtgacgcagacagaggggatggggatagaggaaagggatggtaagttgagatgttgtgtggcaatgggatttgggctaccctaaagggagaaggaagggcagagaatggctgggtcagggccagactggaagacacttcagatctgaggttggatttgctcattgctgtaccacatctgctctagggaatctggattatgttatacaaggcaagcattttttttttttttttaaagacaggttacgaagacaaagtcccagaattgtatctcatactgtctgggattaagggcaaatctattacttttgcaaactgtcctctacatcaattaacatcgtgggtcactacagggagaaaatccaggtcatgcagttcctggcccatcaactgtattgggccttttggatatgctgaacgcagaagaaagggtggaaatcaaccctctcctgtctgccctctgggtccctcctctcacctctccctcgatcatatttccccttggacacttggttagacgccttccaggtcaggatgcacatttctggattgtggttccatgcagccttggggcattatgggttcttcccccacttcccctccaagaccctgtgttcatttggtgttcctggaagcaggtgctacaacatgtgaggcattcggggaagctgcacatgtgccacacagtgacttggccccagacgcatagactgaggtataaagacaagtatgaatattactctcaaaatctttgtataaataaatatttttggggcatcctggatgatttcatcttctggaatattgtttctagaacagtaaaagccttattctaaggtg

SEQ ID NO: 33 - DNA, 16278 bp, Homo sapiens
tcgcggaggcttggggcagccgggtagctcggaggtcgtggcgctgggggctagcaccagcgctctgtcgggaggcgcagcggttaggtggaccggtcagcggactcaccggccagggcgctcggtgctggaatttgatattcattgatccgggttttatccctcttcttttttcttaaacatttttttttaaaactgtattgtttctcgttttaatttatttttgcttgccattccccacttgaatcgggccgacggcttggggagattgctctacttccccaaatcactgtggattttggaaaccagcagaaagaggaaagaggtagcaagagctccagagagaagtcgaggaagagagagacggggtcagagagagcgcgcgggcgtgcgagcagcgaaagcgacaggggcaaagtgagtgacctgcttttgggggtgaccgccggagcgcggcgtgagccctcccccttgggatcccgcagctgaccagtcgcgctgacggacagacagacagacaccgcccccagccccagctaccacctcctccccggccggcggcggacagtggacgcggcggcgagccgcgggcaggggccggagcccgcgcccggaggcggggtggagggggtcggggctcgcggcgtcgcactgaaacttttcgtccaacttctgggctgttctcgcttcggaggagccgtggtccgcgcgggggaagccgagccgagcggagccgcgagaagtgctagctcgggccgggaggagccgcagccggaggagggggaggaggaagaagagaaggaagaggagagggggccgcagtggcgactcggcgctcggaagccgggctcatggacgggtgaggcggcggtgtgcgcagacagtgctccagccgcgcgcgctccccaggccctggcccgggcctcgggccggggaggaagagtagctcgccgaggcgccgaggagagcgggccgccccacagcccgagccggagagggagcgcgagccgcgccggccccggtcgggcctccgaaaccatgaactttctgctgtcttgggtgcattggagccttgccttgctgctctacctccaccatgccaaggtaagcggtcgtgccctgctggcgccgcgggccgctgcgagcgcctctcccggctggggacgtgcgtgcgagcgcgcgcgtgggggctccgtgccccacgcgggtccatgggcaccaggcgtgcggcgtccccctctgtcgtcttaggtgcagggggagggggcgcgcgcgctaggtgggagggtacccggagagaggctcaccgcccacgcgggccctgcccacccaccggagtcaccgcacgtacgatctgggccgaccagccgagggcgggagccggaggaggaggccgagggggctgggcttgcgttgccgctgccggctgaagtttgctcccggccgctggtcccggacgaactggaagtctgagcagcgggggcgggagccagagaccagtgggcagggggtgctcggaccttggaccgcgggagggcagagagcgtggagggggcagggcgcaggagggagagggggcttgctgtcactgccactcggtctcttcagccctcgccgcgagtttgggaaaagttttggggtggattgctgcggggaccccccctccctgctgggccacctgcgccgcgccaaccccgcccgtccccgctcgcgtcccgctcggtgcccgccctcccccgcccggccgggtgcgcgcggcgcggagccgattacatcagcccgggcctggccggccgcgtgttcccggagcctcggctgcccgaatggggagcccagagtggcgagcggcacccctccccccgccagccctccgcgggaaggtgacctctcgaggtagccccagcccggggatccagagaaccatccctaccccttcctactgtctccagaccctacctctgcccagtgctaggaggaatttcctgacgccccttctcttcacccatttcctttttagcctggagagaagcccctgtcaccccgcttattttcatttctctctgcggagaagatccatctaacccctttctggccccagagtccagggaaaggatgatcactgtcagaagtcgtggcgcgggagcccactgggcgctttgtcacattccaccgaaagtcccgacttggtgacagtgtgcttcccttccctcgccaacagttccgagtgagctgtgctttagctctcgtgggggtgggtcaagggaggatttgaagagtcattgccccactttacccttttggagaaatggcttgaaatttgctgtgacacgggcagcatgggaatagtccttcctgaaccctggaaaggagctcctgccagccttgcacacactttgtcctggtgaaaggcagccctggagcaggtgtttttttggaactccaaacctgcccacccaacttgcttctgaaagggactctaaagggtccctttccgctcctctctgacgccttccctcagccagaattcccttggagaggaggcaagaggaaagccatggacaggggtcgctgctaacaccgcaagttcctcagaccctggcacaaaggccttggctacaggcctccaagtagggaggagggggaggagtggctgcctggccacagtgtgaccttcagaggcccccagagaaggacacctggcccctgcctgcctagaaccgcccctcctgtgctccctggccttggaaggggtatgaaatttccgtcccctttcctccttggggcccaggaggagtggagggtcccgggagaatattgtcagggggaaggcagggggtgtcatgggaatgggtgagggggctgaggtgcagaatccagggggtccctgcaggagccgcagtggtaagctgtccagctggaagcctggtaactgttgttttctcttgagaggggcttcctgtgaccttggctgtctctgggagcagggctggggtacctgagtggggtgcatttggggtgtgtgggaaggagagggaaagaaagatggacagtgggactctcccctagcagggtctggtgttccgtaggctagagtgcccctctgctctgcgagtgctgggcgggaggggagttggtgagagctggagacccccaggaagggctggcagaagcctttccttttgggtgctgtcaggtccgcatgtcttggcgtgttgaccttcacagcttctggcgaggggaggaatgatctgatgcgggtggggagggttagaggaggcctcaggcctaaggtggtgcagggggccccctaggggctgggcagtgccaaggcataaaagccttccctggtccctggtggcatttgaaggtgcccaggtgagaggggcttggcacctcctcaccctgggagggagaagaaaccagggaacaggtaggagtgggagacaggtgaggctttggaaatctattgaggctctggagagatttgtgtagagaggaaaatgtggttctcccccagggtctcctcctgggtttttaccctctaagcaacctgtgggcatgctgggttattcctaaggactagaagagcttggatgggggagggtggttggtgcccttcggtcctcggcacccccctccgtctccaacaccagctcaccctggtatttgtcatgtcagcaggagaaggtcaccatgttgtttttctcgcccctagtccttccttcctgccccagtccaaatttgtcctcctatttgaccttaatacttaccatggctttggaccagggaactagggggatagtgagagcagggagagggaagtgtggggaaggtacaggggacctcgacagtgaagcattctggggttttcctcctgcatttcgagctccccagcccccaacatctggttagtctttaacttcctcgggttcataaccatagcagtccaggagtggtgggcatattctgtgcccgtggggacccccggttgtgtcctgttcgactcagaagacttggagaagccagaggctgttggtgggagggaagtgaggagggaggaggggctgggtggctgggcctgtgcaccccagcccctgcccatgcccatgccttgctctctttctgtcctcagtggtcccaggctgcacccatggcagaaggaggagggcagaatcatcacgaaggtgagtccccctggctgttggatggggttccctgtcctctcaggggatgggtggatggcctaattcctttttcttcagaactgtggggaggaaggggaaggggcacaggaatataaggatcaagaaagaaagagctgggcaccacgaggttcaccctcagtttcgtgaggactctccgctgttcaggtctctgctagaagtaggacttgttgcctttttcttctgctctttccagtaaaattttatttggagaaggagtcgtgcgcacagagcaggaagacagtgttcagggatcctaggtgttgggggaagtgtcccttgtttcccctagctcccaggggagagtggacatttagtgtcatttcctatatagacatgtcccatttgtgggaactgtgacccttcctgtgtgagctggaggcacagagggctcagcctaatgggatctctcctcccttccctggtttgcattcctttgggggtggagaaaaccccatttgactatgttcgggtgctgtgaacttccctcccaggccagcagagggctggctgtagctcccaggcgccccgcccccctgcccaaccccgagtccgcctgccttttgttccgttgtggtttggatcctcccatttctctggggacaccctggctctccccaccactgactgtggcctgtgctctccacctctggggagggaaggccctggggtcttccttcccgcgagtttccctgacctaaatctggcgtggctgggtagtggccagcagtggtgatgcccagcctgttctgcctcctccttccccaccccaggagccctttccttggcctaggacctggcttctcagccactgaccggccccctgcttccagtgcgccacttaccccttccagcttcccagtggtctctggtctgggagaggcaggacaaaggtctttgtttgctggagaaaaggttgtctgcgataaataaggaaaaccacgaaagcctggttgttggagtgtacgtgtgtgctcccccaggcagtggaggccagccctccttggaggggcggctgcctgatgaaggatgcgggtgaggttccccgcctccacctcccatgggacttggggattcattccaaggggaagctttttgggggaattcctaccccaggtctttttaccctcagttaccaaccccttgcccaggccagaccttcctgctatcccctcctgggccacaagcctggccctcctctgtcccaattgtgatgaaggggcagttcaaaacttcttgattagtcatcttctcccctatcgacttggctttaaaaaatgaccttttcagacttctagtctcgttcactctttttgatgatgctttgccgtaacccttcgtgggtagagaaggattctgtgcccattggtggtctggataaaagaaatagagacctcacaggaagcagtggactggcctgtttccccactgttctttctgttttcacacctgtggccttctccccaccttcttcccaatcaacctattgtgtacatagcccccctcattgtcctttattcttctggaaagcagaccttggagggaggagtgagggggaggctcagctgtggtctctggggggtgggggttgggagctggggtggaagtccacgaagcatacacttaagatgctttggtgaagttctaaacttcatattacccaggctgaaaaaagagcacttgttcctagggctggaaatggaagccaaaacaccacctttttcagcctgtttcagcatctttagagatcagcccaacccacttacacagttgagcagagttggaggcctagagaggggagggactggcccaaggtcataccaactcatggccagagcctgggcctcctcactggccaggtgttatttcttccctctgggtagggaacctatttcagggacaggattgctatgtggtagtggtggtggggtgcgataggcgtggcaggctgggccacaatttggagtagtcatgccagagtcctgcatttatttattctcaagggccccgcctctgtggcccagaattaccccttcatgctccagtgcaccccaggcttcgtggccagcctgggaaactgtctctaccctggtctcccttcagatcagcttctagaaatgtttcgtggctacagtggcagcactgttttttccatgatgcaagcagtttgccctcttgggcggggttatcagtggctggcagggctggcacagcgtgtccgcccactgccacctgtgggttccaggagggcccagcccctgtgctgatgcccaccaccttctcagctcatgtctggggaagaggactggcagggggaaaggtgcctcctcctgaaaggtgcctcctctgtttttgcctaatataggcttgggaacactttgatgtcagctaattctgactcctttacttactagctgtgcggccttggggcaacttacttagcctctttgagcctcctgttccccatctgtaaaatggaatctcaatagtgtctaatagtaccatgtggagaaacttgtgtgaaatgatagctgtggactactgtacacagtactcaggatgtagtaagtgctcaataaacagctgttggtatggttgacgttatggtagtggttgtggggaggacgtaggaaactggagactagcttggcaaagctggctcttcctccttttagggaaagcttagagcatccccatggggtatacccatactcagactgtcctctggcatcgaggttggcccaggattcagttcagctgtcacagtgaggtggcgggatcagatgtggcaggccatgtcccttggaacttgagtacatcgtgtgatctctggaatgaaaacaggccttcaccagtgttgatggtggaaagcttagggaagtgcttcaaacacagtaggagggacttacgttagattttggaaggacttgcctgattcggaagctccaaagagtggcattacagagctgggtggagagaggggctagccatcttttgtgtcgcccaccgggctcatgtgtcatcgcctctcatgcagtggtgaagttcatggatgtctatcagcgcagctactgccatccaatcgagaccctggtggacatcttccaggagtaccctgatgagatcgagtacatcttcaagccatcctgtgtgcccctgatgcgatgcgggggctgctgcaatgacgagggcctggagtgtgtgcccactgaggagtccaacatcaccatgcaggtgggcatctttgggaagtggggcaagggggggatagggaggggggtaacactttgggaacaggtggtcccaggtcgtttcctggctagatttgccttgtctggctcctgcccctgagttgcacaggggaggtatggtggggtcttgccttctgtggagaagatgcttcattcccagcccaggttcccagcaagccccaaccatctccttctccctgatggttgcccatgggctcaggaggggacagatggatgcctgtgtcaggagcccctctctccctctcttggagagagtcctgagtgcccccccttcttgggggctttgtttgggaagctggatgagcctggtccatggagagtttaaaaagtcttttggtgttacctggtaatggggcacatctcagcccagatagggtgggagggagctgtgaaacacagggagggggttgctttcgggtatctactaggagtcagggtgaagcctagagaggatgaaagaaggggaggggatggggagtggtaagaacctaggatttgaattcccagcctggccaacccttgcagccatgtcttggcctcaagtggaacaagggctccttgaggccagcagggttgggggagttggggtgggcctgagcctctttcctgctagagctcttggtcctccctgcctccaccacccatccctgctctgcagaacccctgggtgctgagtggcaggagccccagggttgtcccatctgggtatggctggctgggtcactaacctctgtgatctgcttccttcctttccagattatgcggatcaaacctcaccaaggccagcacataggagagatgagcttcctacagcacaacaaatgtgaatgcaggtgaggatgtagtcacggattcattatcagcaagtggctgcagggtgcctgatctgtgccagggttaagcatgctgtactttttggcccccgtccagcttcccgctatgtgacctttggcattttacttcaatgtgcctcagtttctacatctgtaaaatgggcacaatagtagtatacttcatagcattgttataatgattaaacaagttatatatgaaaagattaaaacagtgttgctccataataaatgctgtttttactgtgattattattgttgttatccctatcattatcatcaccatcttaacccttccctgttttgctcttttctctctccctacccattgcagaccaaagaaagatagagcaagacaagaaaagtaagtggccctgactttagcacttctccctctccatggccggttgtcttggtttggggctcttggctacctctgttgggggctcccatagcctccctgggtcagggacttggtcttgtgggggacttgtggtggcagcaacaatgggatggagccaactccaggatgatggctctagggctagtgagaaaacatagccaggagcctggcacttcctttggaagggacaatgccttctgggtctccagatcattcctgaccaggacttgctgtttcggtgtgtcagggggcactgtggacactggctcactggcttgctctaggacacccacagtggggagagggagtgggtggcagagaggccagcttttgtgtgtcagaggaaatggcctcttttggtggctgctgtgacggtgcagttggatgcgaggccggctggagggtggtttctcagtgcatgccctcctgtaggcggcaggcggcagacacacagccctcttggccagggagaaaaagttgaatgttggtcattttcagaggcttgtgagtgctccgtgttaaggggcaggtaggatggggtgggggacaaggtctggcggcagtaacccttcaagacagggtgggcggctggcatcagcaagagcttgcagggaaagagagactgagagagagcacctgtgccctgccctttcccccacaccatcttgtctgcctccagtgctgtgcggacattgaagcccccaccaggcctcaaccccttgcctcttccctcagctcccagcttccagagcgaggggatgcggaaaccttccttccaccctttggtgctttctcctaagggggacagacttgccctctctggtcccttctccccctcctttcttccctgtgacagacatcctgaggtgtgttctcttgggcttggcaggcatggagagctctggttctcttgaaggggacaggctacagcctgccccccttcctgtttccccaaatgactgctctgccatggggagagtagggggctcgcctgggctcggaagagtgtctggtgagatggtgtagcaggctttgacaggctggggagagaactccctgccaagtaccgcccaagcctctcctccccagacctccttaactcccaccccatcctgctgcctgcccagggctccaggacacccagccctgcctcccagtccaggtcgtgctgagcaggctggtgttgctcttggttccgtgccagctcccaaggtagccgcttcccccacaccgggattcccagaggttctgtcgcagttgcaaatgaaggcacaaggcctgatacacagccctccctcccactcctgctccccatccaggcaggtctctgaccttctccccaaagtctggcctaccttttatcacccccggaccttcagggtcagacttggacagggctgctgggcaaagagccttccctcaggctttgccccctgccggggactgggagccactgtgagtgtggagacctttgggtcctgtgccctccacccagtctcggcttcccaccaaagccttgtcaggggctgggtttgccatcccatggtgggcagcgtgaggagaagaaagagccatcgagtgcttgctgcccagacacgcctgtgtgcgcccgcgcatgcctccccagagaccacctgcctcctgacacttcctccgggaagcggccctgtgtggctttgctttggtcgttcccccatccctgcccaccttaccacttcttttactccccccaccgcccccgctctctctctgtctctgtttttttattttccagaaaatcagttcgaggaaagggaaaggggcaaaaacgaaagcgcaagaaatcccggtataagtcctggagcgtgtacgttggtgcccgctgctgtctaatgccctggagcctccctggcccccagtacaacctccgcctgccattccctgtaaccctgcctccctcccctggtccttccctggctctcatcctcctggcccgtgtctctctctcactctctcactccactaattggcaccaacgggtagatttggtggtggcattgctggtccagggttggggtgaatgggggtgccgacttggcctggaggattaagggaggggaccctggcttggctgggcaccgattttctctcacccactgggcactggtggcgggcccatgttggcacaggtgcctgctcacccaactggtttccattgctctaggcttctgcactcgtctggaagctgagggtggtggggagggcagacatggcccaagaagggctgtgaatgactggaggcagcttgctgaatgactccttggctgaaggaggagcttgggtgggatcagacaccatgtggcggcctcccttcatctggtggaagtgccctggctcctcacggaggtggggcctctggaggggagccccctattccggcccaacccatggcacccacagaggcctccttgcagggcagcctcttcctctgggtcggaggctgtggtgggccctgccctgggccctctggccaccagcggcctggcctggggacaccgcctccgggcttagcctcccatcacaccctactttagcccaccttggtggaagggcctggacatgagccttgcacggggagaaggtggcccctgattgccatccccagcaggtgaagagtcaaggcgtgctccgatgggggcaacagcagttgggtccctgtggcctgagactcacccttgtctcccagagacacagcattgccccttatggcagcctctccctgcactctctgcccgtctgtgcccgcctcttcctgcggcaggtgtcctagccagtgctgcctctttccgccgctctctctgtcttttgctgtagcgctcggatccttccagggcctgggggctgaccggctgggtgggggtgcagctgcggacatgttagggggtgttgcatggtgattttttttctctctctctgctgatgctctagcttagatgtctttccttttgcctttttgcagtccctgtgggccttgctcagagcggagaaagcatttgtttgtacaagatccgcagacgtgtaaatgttcctgcaaaaacacagactcgcgttgcaaggcgaggcagcttgagttaaacgaacgtacttgcaggttggttcccagagggcaagcaagtcagagaggggcatcacacagagatggggagagagagagagaaagagagtgagcgagcgagcgagcgggagagcgcctgagaggggccagctgcttgctcagtttctagctgcctgcctggtgactgctgccttctctgcttttaaggcccctgtggtgggctgcaggcactggtccagcctggcggggcctgttccgaggttgccctggttgcctgagtggtaggctggtgtggcttagtgtagtggtgtggacgcaagctgtgtgttgtgtcctgtggtccttctgctcatagtggctgttggtcctgatgttattactacctctggtagtaatgctgagaagctgaaagccgattccaggtgtggacaatgtcaacaaagcacagatgctctcgctggggccttgcctcggccctttgaagtctgcatggctgggcttctcactcactcagtgtttcttgctgggggaaggaattgagtctcccacttcagactgggcctccctgaggaaagggttgtgtctccccactcagactgaggttccctgagggtagggctgtgtctctcccctccgacctgggctccctgatagggctgtctccccgctcagactgaggctccctcaggccagggctatgtctccctcctcagactggggctctgagggcaaggggtctggctgttcgtttaggatggggcacttttgcctacacactgaaggagctgtagcatccaagaatactagatacctttaatcctccaccagtcatggtgacaaccccaagcagcccacacattttcaagtgcccccaggatgcgtggagggaggggtctgtgcccattctcctgacattagcctgtgagctccgtaagcccgggcctcgtttacgtacctttgtgagccccgggcatctgtacctctttcctttgcccatactggggaccaaggaagtgtcaagtgcatgagtgaatgtgtgactcagttcagagggtgaggtcaggagcacagggtcgggacaggtggctggcatcttttaatgccttagcttatgttctttataccaacttggcctgtgctcagagtgagggaggccctgggggtcagggtaagcgtcagtcagggaggcaagactttgtggggatttcctagacagggccaaggcacccccagctcaccccgaggctgtgttagggaagtccttggagtgtctcccctcccccagcaatgttcttgtggcttgtgtgtgctcaggggatgctgggaaccaggcctgggtagttggtgtggggtgctgtctgtcttggccctatgtgaaaccaagagggcgtatattagtgctggggtgggggctctgcctaacttcagggctggatgaggggagtctcagttccccaggggtccttgggaaagataagggacttgacattttagggtttttaggtgattattctgctgatgggggtttgtgtgaagtgacctgggagctaactgaagttactctaacctcccaatacctttacccaacccccaagctggctgtatctgggaatatcagtttccaaaattggaggcttaggactccgtttcggggctccccagaagggtagggcctgttctgcctccttctcacaatcacccaggggcaggggcatgctgagaaagttcttggaggccccctttgcttcagctggagtagtgaagccgccgaattgtctctccccatcctaagtgaagcagcatatttgaaaggaaagacaacctgttacctgggcctgcaacctccaggcagctcaagagagatgaggcctacagccacagtgggaggggacatggggaatggagatggtccctcaccttcctggggcctcctgctctacgctaccccctcgggagcctcctgtccccagggcaggcccttgccattgttggtcacccggccaagcctctctgcctcaggcgttctcccagaagatctgcccactctcttccccacaccagcccctagagactgaactgaaaaccctcctcagcagggagcctcttctgattaacttcatccagctctggtcacccatcagctcttaaaatgtcaagtggggactgttctttggtatccgttcatttgttgctttgtaaagtgttcccatgtccttgtcttgtctcaagtagattgcaagctcaggagggtagactgggagcccctgagtggagctgctgctcaggccggggctccctgagggcagggctggggctgttctcatactggggctttctgccccaggaccacaccttcctgtcctctctgctcttatggtgccggaggctgcagtgacccaggggcccccaggaatggggaggccgcctgcctcatcgccaggcctcctcacttggccctaaccccagcctttgttttccatttccctcagatgtgacaagccgaggcggtgagccgggcaggaggaaggagcctccctcagggtttcgggaaccagatctctcaccaggaaagactgatacagaacgatcgatacagaaaccacgctgccgccaccacaccatcaccatcgacagaacagtccttaatccagaaacctgaaatgaaggaagaggagactctgcgcagagcactttgggtccggagggcgagactccggcggaagcattcccgggcgggtgacccagcacggtccctcttggaattggattcgccattttatttttcttgctgctaaatcaccgagcccggaagattagagagttttatttctgggattcctgtagacacacccacccacatacatacatttatatatatatatattatatatatataaaaataaatatctctattttatatatataaaatatatatattctttttttaaattaacagtgctaatgttattggtgtcttcactggatgtatttgactgctgtggacttgagttgggaggggaatgttcccactcagatcctgacagggaagaggaggagatgagagactctggcatgatcttttttttgtcccacttggtggggccagggtcctctcccctgcccaggaatgtgcaaggccagggcatgggggcaaatatgacccagttttgggaacaccgacaaacccagccctggcgctgagcctctctaccccaggtcagacggacagaaagacagatcacaggtacagggatgaggacaccggctctgaccaggagtttggggagcttcaggacattgctgtgctttggggattccctccacatgctgcacgcgcatctcgcccccaggggcactgcctggaagattcaggagcctgggcggccttcgcttactctcacctgcttctgagttgcccaggagaccactggcagatgtcccggcgaagagaagagacacattgttggaagaagcagcccatgacagctccccttcctgggactcgccctcatcctcttcctgctccccttcctggggtgcagcctaaaaggacctatgtcctcacaccattgaaaccactagttctgtccccccaggagacctggttgtgtgtgtgtgagtggttgaccttcctccatcccctggtccttcccttcccttcccgaggcacagagagacagggcaggatccacgtgcccattgtggaggcagagaaaagagaaagtgttttatatacggtacttatttaatatccctttttaattagaaattaaaacagttaatttaattaaagagtagggttttttttcagtattcttggttaatatttaatttcaactatttatgagatgtatcttttgctctctcttgctctcttatttgtaccggtttttgtatataaaattcatgtttccaatctctctctccctgatcggtgacagtcactagcttatcttgaacagatatttaattttgctaacactcagctctgccctccccgatcccctggctccccagcacacattcctttgaaataaggtttcaatatacatctacatactatatatatatttggcaacttgtatttgtgtgtatatatatatatatatgtttatgtatatatgtgattctgataaaatagacattgctattctgttttttatatgtaaaaacaaaacaagaaaaaatagagaattctacatactaaatctctctccttttttaattttaatatttgttatcatttatttattggtgctactgtttatccgtaataattgtggggaaaagatattaacatcacgtctttgtctctagtgcagtttttcgagatattccgtagtacatatttatttttaaacaacgacaaagaaatacagatatatcttaaaaaaaaaaaagcattttgtattaaagaatttaattctgatctcaa

SEQ ID NO: 34 - DNA, 52859 bp, Homo sapiens
gcgcgcgccggcctgggcaggcgagcgggcgcgctcccgccccctctcccctccccgcgcgcccgagcgcgcctccgcccttgcccgccccctgacgctgcctcagctcctcagtgcacagtgctgcctcgtctgaggggacaggaggatcaccctcttcgtcgcttcggccagtgtgtcgggctgggccctgacaagccacctgaggagaggctcggagccgggcccggaccccggcgattgccgcccgcttctctctagtctcacgaggggtttcccgcctcgcacccccacctctggacttgcctttccttctcttctccgcgtgtggagggagccagcgcttaggccggagcgagcctgggggccgcccgccgtgaagacatcgcggggaccgattcaccatggagggcgccggcggcgcgaacgacaagaaaaagtaagcccattccctcggcccgccgccttctcccccggcgaccccgcccgcctgcccgccctgggctcctgggccggcctcggcgttaatgggattggggggggcagcctttttgtttctgctgctgctcccctcccctctcttcccccaacctcgccggccgggctcccccgctgtccacgtcgccatcttgtcgtggggggtgggagacgcctcgaaagtgctttcaggggccggggtctgagccctgcttgccctccccgccggccgtgggggcctcgcgccgcccacctacccgcctcaaaaacccagcctgctctgtggccccatccggaggggactttacccagcctgaaaaccccgggaagagaaatgagctgcagctcggtagccgcggtttgcacccggagcttccgctccttcccgcccccatcctctccagttccattgaaaactcggccctggggcggaccctgcacgctggtcctggctttccagtggacttggggccttgagttcccgactgagggactcgcgtggtcggatgcgatcttgtcctgtagttgtccagccgtcgcgggtgtctttgcctttgtgcattagggatttgccgcgatggccttaagatgcgaactttttagtttgcacgtgcaggttttgtttcgttttaatcgccttgaaaaacttgcctagactgagagtcagagtaatgggaatttagggaaatggcaacattttaaagagaacttcagaattggatacttgagttcatatcacctgtcacgagaacgcagatattataaatgaatatatgcctcattcattcttcaaataatgaaaatgtaggggctggttaaatttaggcagttttaatgatactgaaaaaagtatatgatgagtgaatgaaatgcggcactaaaatgttgcaaaaattttcgaactctgtctcattttcctgaaattgaagtatattaaaggaaaaccgtcaacatatatctaaagtaagtaatcactcggttagaacttaatgcaagttttataaatcaccttgaagtttgagtctaaggggtacattagagattaagaattgtgagttggaccagtggtgttaagagcggactcccccatcccccaacacacacacaattttgcccactttggcattttaacttttaaggaaatcacttaaggaattgaagatttagagtaagagttttggttagtagactggctttgctgttaaatccttccactcttctggcagagagattaatttccctaatcagtatcagcagaagataaacttgtttatattcctgctgttttgtagatcccttctcctggtccttcttcaatagaatattaaattcttagtttgtatacagcagagaaggtcacttataaaattcaaaaagtgagcaaacaggtctagattaattccaagagttaccaggaattaattgcagtttattttgcggaggtgattacagtgcttttgatgaaatgataaagctgctatattgtaaacctaaggcagattacctctgtgtagtgccagttttctatccttattatatattgaatcatacttaatacaatgcattaaattatgtaccactttttttatatacagtatcgaactcattgttttgccattcatccgttcagaatatcagaagcagttttgaaacgaattaataaattagctactgttcatcagccccaattctaaataagctcttagattttcctcagcccatctgttactttcaaaattttctcatttgaaaacttggcaaccttggattggatggattcatatttcttagtatagaagttcttgatataactgaaaaattaagttaaacacttaataagtggtggttactcagcacttttagatgctgtttataatagatgaccttttctaactaatttacagttttttgaaagataactgagaggttgagggacggagattttcttcaagcaattttttttttcattttaaatgagctcccaatgtcggagtttggaaaacaaatttgtctttttaaaagaaggtctaggaaactcaaaacctgaagaattggaagaaatcagaatagaaaatgggtatggttatgatactgtagatttaacgcaggacatttcatgttgttcctagttataggggctgaacttatttaatagcacgtgcattttgatttttagatttttaagggaatgtcaagagagtaatgattctgtttcaggcttcaggccagactccttcagagttttccaaaacaaataattactgaatcattaaagtaaaatttctgagaatagatattccttaatttccttcattaactttggccattaaaagtcaagaagctctctcatttattagcaaacttttctccttatgattctattttgattgtccttttgtttgaggaagcagcatatggtggttaagagcataggatctagaggcagatacctctgagttaagggtcccagcccttcacttgtgagcttgagcaagttactgaatgcctctgagcctctttcctccttttgaaatgatgataagaatagcagccatctgagcagttattgtaaaggttaaatgagataatgcttgtgaagcacttagcccattgcaggagtcttgatgacactgtgtacttgaaaatagatgttacctgttaaaattcttgtttaaacttccacaactcttaaaactcttttttgctagtccttccagctgtttcctttagtttcttttctgtgtcttcatgcatcttttctatctcctgaaagtgaaaagactaacattggatccagagcttgaaaagcgtttttttcctgttacaatgggcaaaagagtacatccttgggttatattggcacctagtatcagttatttttcttgagcatctgatctgctctctactctagtggaggcctcctgcttcacaattgctcacccctgtgttttctccccaaatagaatactgagtttactctggactctagagtcaaacatacacagtattctagtcttactgttcatttaagcaagatatgtgcaagacactgcattcttagtactggcagtaagttaaaacatttttcgtcttgatgccaaagtttagacaattttataaaaattaacctttgtaaaagataatgagttgataaaatattctcagtaaagcagctacgtggtagaaaaactgtcctttgcttatgagtttctccagagttaagaccattgggttccatctgaaggcaagacttcaagcttgtcttactggtctgttttgtggctcaatttgtatgaagtctatgcactcttccacacgtgtgtatttactgaactatcgagttattttagactgagaaagtattggagttcattcctacggtccactgcagagcaccttgtgcagtttggagaatgtcaacttttctacctgttaacttccattgtctttacttttaacgccattgtctgtgactctaatggtgtcacggctcagggtttagattttgtggttacattctattcttgtatgtcaagagtggtgtatagaaagctgagggggattatttagtctcttgactgattttttttttttttctgaagaactcagtttattatgtttggtggtgaaataaaaattgatgtgcatggatgttaaagatttgggttaaattgtgtgttcatagatgccttctcttagtatataattttttaaatttagatacttaaaatactgtatccctttatctaagattaacataagtctgtttcttaaccaggataaaaaaatctaaatttaaatgtgatgttggatgagtttccaatcaagaaattgattttttaaactttgtgactagttatccagtgggtggattttacccagtgtgtgtatgtgttttctgcttaactctggaaggttagaaagagaatttgaaactaagacaagccaagcttcttgttgctcagtatttttggtaaaaatatggtcagattgtttaaattaactataggctttggaattttaaaaataattatatctcttggtctcttgacacatcaagaattaactgttttgtatatgcgttgagtattaatgttcatgttttctgcagtagaaatttataaacccttatttatttgccagacatgatccctttagagaaatctagtatctaaaacctgaatttttaaaacaaaatttaaaatttttgtttcataaaaacaaaaatgtgattacctcatggcttttttcttatagcttttgattgttttttaaaatcgtagttcaaaaacattaacctaaaatttaccatcttaaccatttctaagtactgttcagtagtgttaagtatattcacattgtgccactaacttccagaactttttcatcttgcaaagctgaaatcttacccattaaacaactcccaatttccccctctcctcagcctctggcaaccaccattttactttctgtttctgcaaatttaactactctagatgcctcatataaatagaattatagggttttaatatttttgtgatgggcttatttcactttgtgtaatgtcctcaaggttcatccatgttgtagcatgtgtcagaatttccttcctttttgagtctgagcaatattccattatatgttccatattttgtttctccattcatccagcaacggacacttgggttgcttccacatcttggttattgtgctgctctgaacatgagtctgcaaatctctctttgaagctttcactttttttggatacatatccagaagagggatgctggatcatatggtaaccctttttaattttcaaggaaccaccatattgttttctatagcagttgcaccagtttacattcccaccaacagtgcacaagggttcctatttctccacatccttctaaacacttgttttctttctttccttccttctcttctctttctttcttagccatctaatgtggcaaagtggtagccatctaatatgttgaagtgattgtttttaagggcttgtttgtggataattaaccagctgaaagctaactacagtttgccagtggaagctttaactgaaaggagagtaagtacctctaaaaggagaattcaatttttctagtgacttagatttgttatgccagtactttttcacagaaacactttttgggtaaaatagtgtacacctgttctattgttgataaagcccaatttaattaggaaatttgttctctaagatttaaaacaataattgaaataatgtatttttattaaaaactgttcccaagatgttagcttttagctgttctggtgatctcaactgttatttatgagtgtttctttattttaaaatttcaccttaaccggttacagttttaaccataaagattatttcaacatatgattttgaaaatttattatcttgtaaatgggaaaatgtagtgatggaacatagtttactgtatgtagttcttcacttgtttgaaaagtcacaatatatttaggcaaattaatttaaaagtgtctagtatttaatattgcaattttcactcattaaggacaggtcccccgtgtttcccccttttttttttccaagtagtttgggaggatttgtttttccagctgaaaaatactatggttaaaaataaggtttaaaggcgaaagttgaagtctttgagggttgggatacgtttctgttcttaagagtcttgtaaattcagatgctaagcaaatttctttaaaatgatttctaccctccccctttccattataaaactggatatgtttcagtggaccaaatcccaagtaggctgaatttgaaatttgtgggctgggcgcggtggctcatgcttgtaatcccagtactttgggatgccgaggtgggtggatcacctgaggtcaggagttcgagaccagcctggccaacatggtgaaaccccatctctactaaaaataccaaaattagccaggcgtggtggcgggtgcctgtaatcccagctacttaggaggctgaggcaggagaattgcttgaacctgggaggcggaggttgcggtgagccaagatcgccccattgcactccagcctgggtgacagagcaagactgtgtttcaaaaaaattaaaaaagaaatctgtggtgtgaatactggtacgtggtgtacacagtgagctcttaataagtatttgaattaacaaatgagacaatgattgaataattggatgaacaaagagaatgcaggtttttaaaaggtttctttagaaatattgtcggcccggcacggtggctcctgcctgtaatcccaccattttgggaggccggggcaggtgaatcacctgaggtcaggagttcaagacaagcctgaccaacttggagaaaccccgtctctactaaaaatacaaaaaaaaaaaaaaaaaaatagcaggatgtggtggcacatgcctgtaatcccagctactcggaggctgaggcaggagaatcgcttgaacctgggaagcagaggttgcagtgagccaagatcgcgccactgcactccagcctgatgacagtgtgagatgctgtctccaaaaaaaaaaaaaaaaaattaaaaagaatgttttaattctttagttccctgtctgagattcactgattggtaagaagaaagttaaagaatctcctttgactttttttgatatagatatttaaattctattactttatagtaaggttggggtttattttctttgctttataatagaagagcattgattattctctttgctttataatagaataccatttaaataggagttccctgagtgtgtttacaatcatttgatctggctaaactattttaatgttaatgaaattttaaaattttggaggaaaaaatttaaaaactacacaggtgcacaaagaaataaaaatcacctgctttttcactatgtagagaccattgtctactatttctcaattctgtgttacatctgtatgttaataactgtaggattagggactgagtactgtttttaacctgcttttaaaaaatttacatctacattttttcccatctaaatagtgaggaagagtatcagaattttgtaggcttgtggtgatggttaaattagataatattaatgttgggtacttaacataatatatggctcttaatactctccagatttcagatatagtctgttttaccattactgcctttttatcaaacctattctcaaaaaagtgagaaaagtgctgagattacaggcgtgagccaccatgcccggcctcatggttctttcttaataataaattagaagaagtagaattacagggtcaaaaagtatccattttaaagctttcaatgtaattgcctgtttatcttctagaaagtttgacctagttgtattttagagtgtcattttcttgaactttatcatcattaaagttttaaatttggaacactggcaatttgataagtatattaggattcttcttattgcaagtagcaaaatacaactcaatctagtttaagaggggaaaatgtagtcattggctaacacaatctaattttggtttaagagacaaatctagagtctcaaatgatctcagagtgtaataatccctgacttttgtcttgatattacttggcttgtatacctttgctctatttgcatgctggccttactctgccactgacaggctgtctgtatggtgtggaagaggacggctagcatccccatacctgcatccatacagtttgtaatataaaaaaaaaaaaagtaaaaaaaactccctctctcttctagtgtctatatatcagtttcctagaagaaaacgttttgccctacttggccatgtgaatggagttccctgattacatgagtcaaatatgtcttattgtagcatatttgatggtcttcttgtagaatattatcttactatacacagaactcttgaccagtaattaatgggccatgagtttttgttgcaagtcatttgaattcatattctatagttttctaccaagtgtagtcattctgcaagctgttcttgtcatgacttttgggaagttgagtatttcttctatgggttagggttttcatctcaagaaaaagatgatccttttctctactaaatatgtgttaagatcacacatttttctagatcgtttagctctactgtgtgatcttacacaaattgctttattgggatgataagaataattgccttataggattgttatgagaatgaaatgatacatcaactcatatgaaacactcagaacagctcttggcacaaagtaagggcttaattaagtagaaactatccatatattcataatattatagtattggttaagttgttttcaacattgtttagaatcgctcaagccttctttgtgataatctgacgaaggctattcaccaccagtgagtaaataatagtggcagaatagttactgatgcttttcctttacttggttttttttccataaacatctggcctttgcagactaaatactggtttatgtatagacatgttattctaaaataattttccatagtggtaatactaaaggaagaaaaatgttctcaaagctatttatttgggatgttaaaggagggggaaattaagaaagcctacatttccatgtcctttgtgtccagaatctcattaaatgtcttttaacttgttagcagaggaaagttggatattgcctgcctttgtagctaacatagttaaaatatttaaatggttatagtgtcaaaccagtagtcaaagccttcactgtgaatggatgaagggatattttcttgaataatttaagttgacttatttcagtggttcaaaaaatttcttcaacgcttaaccatgactcaggcacctaactattatactatgtcctgtaacagattgttgtgcattcatttattcaacaggtatttgtgcagctaatttattgagtacagcattgaatcgttgatggcttaggccacagttgaacattccattttttatgttcattcattcattcatagcatattccatttttaaattttcagttcattgcactttaaagtttgaggttcttgcgaagtacagacttttgggtttaagttttgttatttaatgtcaaccaccacaggcgcattggccagtctgcttttagaattttcagacatacatacacaaaacattctcacaagacaatctacttattttcttttttattcctgtgtttcttaacacaggattaatgttcagatctcttttggagcaaaataatcctctgaatttttgagatgtacccagtgacctcagtctgagtatgtatactgcattaaaaaatgtaaccttgttccttttagtggtcatttggtaacagtttgatcataaacaaatgcagcctcaaacacagaaggcttgaggcaagtatacagaactatggagagatcatttagatgatgtagaatatgccttttctttttttacaatgccaccaaaatgaaaacacggttttaaaaattctcatagagtgtaacttcaacactgctttaactctattaaacaaagcactgccatgttgtaattcctatttattactctctggagttgtataaattaccaaatccgccttttgtttgatatccttttcaaatatctgagggtagctatcatgtttcttccttctattcttaaaaaatagtcccaaatttcttgaatcttttaatttaaaaattatatattgagcatctgatttgtggaaaggcataggccatattaaaaatggggcttcatattaaaatggggaaaagggtggagattctcaggtggaatctgagatctgccacacactaatagtgttacctaaccctttttaaagacaaagaaacaggatcagaaggtcactttggaaaatttatttggtaatattggataggatggattagtatagttggaaaacagagactcttgctttaggagagctgctcctttgtcatttccagaatcttaatcatggtcaaggtttagagctaaatatttaatagaagaagtctttagggtatgctttctattgtacacccttatttcaatacatgtgttttttcctgttatgtaagtactttattattatttatgcatcttctattaaagttaagcaaataattatttcaaggacacattcttctacatacacacaaagtttagggtcactgaccttcttaggttctagtcttagatctgttaccatctaagagcatataaataagggaaacagaaagaaaaggatttacaagctgagaaggaagcaatgcagagaaagaagagtgatagagtaggtaatttggggaaagtcagtgatacacagctcttaaccatgaacagtgattcttcactcttgaatgtttgtgacattcatgaaggtattaaaagctgacttttaaaaaattgtttcagagaactggaaaaaaattcagttgccacattcttccttaggtcatctttgaactctactcatgcacttacgtgtttaaggcaaagttttactaaacgcacacttgttcttgctggcttattgacttttactgctagcttcttattcttagcaattatacctcacattacatagtattgtgaaactcactatattcagtgttttgcctgacaaacatggtatgttataggatgtgtattcagttatagctaaaaataaattattctcgtttttcaaaatttgctggcctacctgttaagcttttgctttaagacctgctaatgtttctcaaacttctgtggttaaatcacctgagtgtctagttgctctatggattcccagggacccattcgccagagattctgatttggtaattttgggatggaactcagggatctgtaaattttacaagcactcagaaatgaaacatagactttaaacagctaagagtgctcatcaggattatgttgatattattttttaaacagatgtgccaagcctttaatttgaatttccagggttgggatttggccttctatatttgggggaaaaaagttctattgatgattgtggatatataccacaggtcaaccattgaatagtctagtcagtgtagttagtgtattttataattactaagttctaagtatgtggtgtattaatgtcttaggaggtggatatatttcctgtatttgtaaagcatttgggtaggttttttaaagagaaaagtatgtaacaaactagttttgagcgttgctcttttacttctttgggcatttttgaagaacacgttaagtatcttcttagagcagaggggctcagagtggtccccagattatcatcattggtaacacctagttggtgcattactaacttgttagaaatgcacattctcaggcgccattcagacttcataaatcagaaactctggaagtaaggctcagcattctgtgttttttttttctttattatactttaagttttagggtacatgtgcacaacgtgcaggttagttacatatgtatacatgtgccatgttggtgtgctgcacccagtaactcgtcatttaacattaggtatatctcctaatgctatccctccccgctccccccaccccacaacaggccccggcgtgtgatgttccccttcctgtgtccatgtgttctcattgttcagttcctacctatgagtgagaacacgcggtgtttggttttttgtccttgcgatagtttgctgagaatgatggtttccggcttcatccatgtccctacaaaggacatgaactcatccttttttatggctgaatagtattccatggtgtatatgtgccacattttcttaatccagtctatcattattggacatttgggttggttccaagtctttgctattgtgaatagtgccacaataaacatacgtgtgcatgtgtctttatagcagcatgatttataatcctttgggtatatacccagtaatgggatggctgggtcaaatggtatttctagttctagatccctgaggaatcgccacactgacttccacaatggttgaactagtttacagtcccactaacagtgtaaaagtgttcctgtttctccacatcctctccagcacctgttgtttcctgactttttaatgatcgccattctaactggtgtgagatggtatctcattgtggttttgatttgcatttctctgatggccagtgatgatgagcattttttcatgtgtcttttggcagcataaatgtcgtcttttgagaagtgtctgttcatatcgtttgcccactttttgatggggttgtttttttcttgtaaatttgtttgagttcattgtagattctggatactagccctttgtcagatgagtagattgcaaaaattttctcccattctgtaggttgcctgttcactctgatggtagtttcttttgctgtgcagaagctctttagtttaattagatcctatttgtcaattttggcttctgttgccatggcttttggtgttttaaacatgaagtccttgcccatgcctatgtcctgaatggtattgcctaggttttattctacggtttttatggttttaggtctaacatttaagtctttaatccatcttgaattaattttagcataaggtgtaaggaagggatccagtttcagctttctgcatatggctagccagttttcccagcaccatttattaaatagggaatcctttccccatttcttgtttttgtcaggtttgtcaaagatcagatggttgtagataagcggcattatttctgagggctctgttctgttccattggtctatatctctgttttggtaccagtaccatgctgttttggttactgcatccttgtagtatagtttgaagtcaggtagtgtgatgcctccagctttgttcttttggcttaggattgacttggcaagcattctgtgttttgagaattcttccaggggactgtgatgaaaactgacgtttgagaaccttcatcttagagtaaaaactttacatacacatttttgttgttttatttatctagcacaatacttcttttttttgaaatggagttttgctcttgttgcccaggctggagtgcaatggtgtaatctcagctcaccacaacctccatctcccaggttcagttgattctcctgcctcagcctcccgagtagctggggttacaggcacgtggcaacatgcctagctaattttgtatttttagtagagacggggtttctccatgttggtcaggctggtctcgaactcccgacctcaggtgatccgcccacctcagcctcccaaagtgctgggattacaggcgtgagccactgcacctggcacaataccttatatataatcagggctcaaagatttgttgagaggctcaacaccaattctggaccaggaaagattttatttatatcactagtcaggaataatctaaaaacaaaaagcacattcttcttacaagtaatatttcaatacacattaatgtaaacacatggaaaagtattagctacttaataaattaacatgtaaatgaaaaatttacacattatggctatttcagatgtgatatagatttcattttcagaaggaaccctccaatgtaaaacagtgattcttttccccgtttattttactgcattagaaaatcacatttaaagtaagcattttggtgaggtttggaaggtgaataaatccatcttttctttaattatggatatttaagagagatgttgttgtgccgtttagataataatgatctaaaccaagaaatttagttgctttcaaaaataaaataagtgtatgcattctgaacatttttctttagaaacaaaccatttcatctgtttttttgaatttcaaattaattatacagaattttcaaaatttgaaaattaggttagcatgagaaactgaagatactgaattatattgcctgttcagtctatacttttctttaggatatacagtaggaaagaaatatgatagttcaagttagattactacttctttcagagttttttgacaaatgcaggtacagtgatagtgtcagttcatggtgaatttttgttaaaataaattacaaaaaatttgtgatcctggtatcttgaaactagttaatatttgtaaactttgctaacactgtatatcactgtattctggttttatctgtgcatctatgagttatatgtgtgtatagctacatatgtttatatttatacacatacattacacacaggagtggaatcatactcaattttttttgtatagcctgctctgttcatataatactatattgtagcatctagtataagcaaagattaatttttgtagactttgcttttatcctgaaattttgtggtagctggtttaatggaaagacaatttctgtgacgtgttttgtcagttagggattgaccctggtaaaatattgctggataacaacaagcaatgtaaaaatacatttgttccataagataacctccgtgaaggtagagacttggtctgttttgtttattgcaccgtgtcctgttctgggaagagtgttagactcatagaagatgatcaagaaatattttttgaatacatcaataacattctctaacatgtgggtatcctaaaggtttatttttaaagtttattgattagaattcagaagatattttcccagataaaataatagattgctagctgtcttgaaaatgtaatttatatttaatttgaaatgtcaggtttttgctattttttccattaagtagagatagggtttttaaaaattacatgtgatgttttaagtattctggttttgcaacaattactagatagaaaatgtaacaacagatcctattaataatacttccaataatacatataaaatacttgtctaaaagtaaccctccttaaaaaaacaaagctggccaggcgcggtggctcacgcctgtaatcccagcactttgggaggctgaggcaggcggatcaagaggtcaggagttcaagaccagcctggccaacatagtgaaaccccatctctagtaaaaatacaaaaaattagccgggtgtggtggcaggcgcctgtaaccccagctactcaggaaaatcgcttgaacctgggaggcggaggttgcagtgagcggagatcgcaccactgtacttcagccttgggcaacagtgcgagactctgtctcaaaaaaaaaaaaaaaaaaaggcaataggattaggtatcaacttaatgaaaacttcgtgacagcactttcttgaaaaagactgtggaaaccaaagttagtaaactcctgtttctgcctgggttcggaaaacataaagatgataaagatgtttaagtattcctttttttttttttttttttttttgagacagtgtcttgctctgtctggagtgcagtggcacaatcacagctcactgcagccttgaactcctgggctcaaataatcctcctgcctcagcctcctgagtatctggaactacaggagtgcaccattacactcggctagtaatttgattggttaagaacattaactataactcacacattttcctgaccacatttgcttaggacaaaacagtaaaagacatgagtgtagatgaaagcgataagggaactaatcttaaacactgaacctcttttcagcaaattggctttctagtttctcagctctctctttacacctctaaatctctttcctggcaagatcatttatttgccttggtttatggtgatactcttcattgttatactggtgggtgattgttttaattgatagctgtttttttctacttcaggaagatgacactgctggctctgctggctctgatgtttaccttgtggctaatgcctgtgtttgcctgtgttcacatttattccacgattcatttgttaacatttactaagctgcttttctgtgccaggaacttggctagataaataaatggttgtttttgtacacagaattagctgtcataatcagttactgtagcatttattcttgcaaaaatatatatttatacttcaactagtgatcgaatctcaacttattaattcatacattcagccagcacataattgaatacttcttatgtgtcagaaactgttctaggtgcttgggatgttcattgaacaaaatagacaaaagtctccgcctctatggaacttactttccagtgaaggtgtggattggtgggatagaaaataaaataatcaagtaagatatgtacttaggctttcataaaaatacagcagggcaagaggaccaagatggaggcagtgatcagggaatctcaatgagggtgagactgcgacaaagacttgaaaaaggtggagaagcaagccttgtgggtatttagggtagcagtagtccaggcaaggggaacaactagtgcaaaggctctaggaggcaatgtgtttgaagtgttttaagaacagtaaggaggctagtatggttagaacagaatgagcaaagggggcaaagtggtagaaggtgagatcaaagaggtaatgaggccattgtggaggcccatatggactattggaagggctttggcttttactctaaatgaggcaaaaaccattttaagcagagaggagtgatatgacttgatttcttgttaaaaggattattctagttgctgttacagaaaaagattacaggggtgcaaagaaacagggagacaaaagaatataagattttcactgtaacttatatctagtatgcttgcttatacttgaaaatgcatatccagataattgtagtaaattcaaatattatgtttatttaatagtactaacattgatatgctggttaattatgattaggagcactaataaagcacaaatcagggattcccaaaaagaatgttgaaagggcagtcagcttttcctgtgccagaaatcaaagtcatagcagatttggggcaaatatgtcaaagtcaaacttacgcacatcactactgagaagacaaagatgaatgtgtgacagtttcctgcccccaagaatctttaagcattgtgaaggaagattaatatagccaaataactagagtgatcagttctaccagagaggaccagttttggaagccagaggaaaaaaaaaaaaaacagaaacaaaatgatgtttgaattaaatctttaaaagtttctcttataaatttaccaagccacatattgggaatggtaccccaggcagaaggagtagagtaagcaagccagaaaggaaatactatggtgcttttgagtaactgcagtgtggctgaagaatgtggaaaatgatgaggataaagaggtggacagggaactaggtaagggagggcttccttttaaataattagaccttgtcctgtgtacatttaatgggattttaatcaggccataatgccaaatttctttacttcggaaggatctttatggtgatggtttcagaaagaaattaaagcagagtaacagtggttagcaataatgatcagctagtggttcccaaacttacgtatcatatgcatcttggaagtttttaaaaactcagattttgggatcctgacttagatctactgaatcagaatttacagattcaaattcccagtgaggcctaggaatttgaaatgttgaatgtccttcacgatgcagctagacaagcatttgggaataaagcattaggtgactatttcagtagactaaggagtgggaggccatttaagctcaaaggctattctacttctcactatatttctagtacctagcacagtgcatggtacttgatagatgcatcctttctcccatacctcgccctacacatctcttcatgtgtatccttattaatatcctctattataaactggtaaacatgtttccctgagttctgtgagctgctccagcaaagatgggtttgtgagaatcccaacttttgaagcctgtcagtcagaagttcctgaggccagacttgcaactcctgttgagggggcagtcttggggactgagccctcaacctgacactgtctccaggtagatagtgttagaattgaattgaaggacacccagttggtgtccgctgcagaactgattgctcacctggtggtggagagaacccctcctctcccgatagggttgcagaagttgtcttctgtgttgttgattgctgtggtgtgggagcagaggggggaaaaaagctgttggagagttttttccaaaacaataggagattatttagatttataaaaatagaatcaaagtagattaactgagcacattgtgaaatatagagtagagctgtgtgtaaggagtatatcttaatgtcaagctgacaccaaattgaatgtttgctggaacgttcaaaaatctaagcttcccaaatctgtgaaaacactcaggttagtaaacagtcttatgcaaacagcaagacaatgctcaaagccatttaaggaaaaagaacagtaactgaattctcttatggaaatgtgagatgttgttttagtaagtactgatggtgttatactttttgtttattcgtttgctggtatttcagttcctaaaattccttcaaatatgctgcaaaatacaaaccaagaacttggtggattttccatttgttttcctgtgggaaatgatggaattaaaaaccttgaggattagaccttgagagttaccttccagtgtttatgccaccattatacaaaattctggaggacaaaacccttcccacttaaaaaccagttagtttcagaaaatcacctcatgttaggagactgcatcattatagtatgtgtgttagctttaggtatagatctaaaatatttttaatattttaaaaacttaagcctttcttcattaatttggcctaatacaagttagaataactttaaaaatgagtacaaacaacaaggaagggccaggcgcagtggctcaacgcctgtaatccgaacactttgggaggccaaggtgggcagatcacctgaggtcaggagttccagaccagcctggccaacataatgaaaccccatctctactaagaatacaaaaattagctgggcgtggtggcacacgcctgtaatcccagctactcgggaggctgaggcaggagaattgcttgaacccaggaggcagaggttgcagtgagccgagatcgcgccattgcactccagtctgggcaacaagggtgaaatgccgtctcaggaaaaaaaaaaacagtttctgtgactgctagacaaatgttgagcaagtaaaacaccaacaatgttgaacttagatattgaaatagctgctctgtacaaataaagtctactgggagtatagactgaattaccatcttttgactctttcgccataatgattggcattaccggaagggattaccttgctttgaagagctgctggacagtagagcagagagcatctattaccattgtaggtgcctttcagttaggattttggatttataagcaaactccaagaaagagcctggttctgagtttctctgaatagcttaggtcaagtcctaaattctgaagccaactcctataattccttctttatgtctttggcatgtgaagtaggcaaatttcgaactttataataatagcctagacttacaaatacttgccttggtaatcaggatgagtttttgagagacaacatagtctagtgttaatcgcgtggacaccagactgcttgagtgaaatacaggttctaccatttattaacggagtaatgttgggtaagctatttagccagggtccttatctgtaacatggtgataataataaagattaaataataggtgaaaaatgtttagaataccactgtgttattagtaagcaccatgcataggtgtttggatttaaaaatactggcaaaggccaggttgggtggctcacacctataatcctcgcactttgggaggccaaggcagaaggatcgctttagcccaggagttcaggaccagtcgaggcaacatagattccgtctctgcaaaaaatttaacagaattagttgggcatggtagcgtgtgcctgtagctacttgggaggctgaggtagggagggggaggattgcttgagcccacgatttcgaggctgcagtgagcttatgatcatgccactgtactccagcttgggtgacagagcaagactctgtctctaaaataaaatgaaaataaaactgcaggcaaaaatgccaactgaagagtgaacatgaacttttctttgcatttttcttgggcctgagactttaagaagtgcagggcagttaaaatgatgagatataattctcacctatcagctcagcagaaattaataagattaaaaagatgcgtaatatataatattgcagagtgcatgggggaattgatatacacattcatgaactggcagagacaaaaatgggcacagaaccatttggaaagctattgtgtattttaaaaaatttcagtagcacattttttatatcatgaaatttcacttcagaatgtcagtcctgtagaaatactgacgcaagtgcaaaaacaacaaaaaccaacttgtaccttcaaggccagaaagagttatttcaccaaataacataattgaggtacattaactttattagaagtaaatctgataatctgctcacattttaaatagttatggtttaacttcagttcttgaagtcacatatttttacaattaggaatgctaacaggctttttgtgcaatacgaaaagatgactttaaatgcctacaattattttgtgtccttttatttttttttaatttttactgacctactacaaagcactaaatattttatgttcttaatctgaagaacaatagacattctctataaaacaactcttgcttattcatgaactttgtacacaagaagcttaataagacgggctcaaaattatttttctaaatatatttcctatacaaaataatttcaagatataattgttacttttgtgtctaatactgtatgttaaataataaaatggtaagcatgtaaaaactacaataccacaaagattgagctattttgccagtagtatactccaactttagttctagaacagttgtagaaatgggtaaacaaactgttttaactgtactcttaactgaaatatagtaccttatgcagtagcagaacatatcagcagaagaacttcacttgacctgtacttaaaaacaaaacagatgcaatttataaaatttagagaaatatagtgaccttatttgcatgtggaaaatgtacttctttctgatctacatatcttctgttgtgcaatgtaagcagtaaaacaaatagtacaggattcatctctgtgggacctagaccccctggtctaacaaataattcttggtcagtactgtaattctgtggtataaaactgataaaattagccttcctgtgactagacaagaagccgggcagtttaaatgctgaaactcacaagaacttcagaagctttagctttaagctttaagcttacttagaaatgttataagacctccagtagtcacatatgaagaatatcatgaagatttttccattaaatctttattatagatcccttgattggtttctgtctagactcattgtgtgataaaggacataataatttttatcaccttcatctaatataggtttgtcaactctatattagttgttttcttgaaggctggttttcttccaaaattcagtcttattttcagtctacactagcttttaaatatactgtcctttagatgctttatctaacctcaaatttctaatggatttgtcttagacacttattgccactccttagatagtcattgctatctttgaagttctggacgatacgtgtattacagaggaactggagacattccatcaccatagttagcttgattggataccctttaaaagcatatactcgcgcctgtaatcccagcactttgggaggccgaggcgggtggatcacttgaggtctggagtttgagacaagcctggccaacatggtgaaacctgtctgtactaaaaatacaaaaattagcctggcatggtaccacatgcctgtaatcccagctactcaggaggctgaggcaggagaattgcttgaacctgggaagtggaggttgcagtgaaccaagatcttgccattgcactccagcctgggtgacaagagcagaactccattaaaaaaaaaaaaaagcatatatagcacatattataaggttttcaattttttcaccaagtgtttcatttgggtagtcatttattggtagtttacatcagttgagtggttcagaaaaaatacagtaagttgcttataaaattctgaacactttggccaggcacaatggctcaagcctgtaatttgagccctttgtgaggctgaggcaggagaattgcttgagcttaggcgttcaagaccagcctaggtaacaaagaacgcctggaatgattgtggcatttgaactaatattcaggtttaacaagagataattgaccatcactctattttagaggctttatttgaaccagatagaaatctatttcccacagctatcactgcctgtcacctacaacttaagggggttggggaggaagtgagagattttctgttagggccaatagggacctgctagatacccccccatcctgggaatggtgtatggaactccagtgtatgctggagttattatcatcatacttgtttttttattttactcttctgcttatacagatcaagtcttacgttttatttttaagtttaaattgaaaacatttacagagaacaatgcagtgaaatgaaaaaattacagactgctggcatttgcattttcatgtagcctcagtgactaatttttttttattgtacagcattgagaaaatcctagttcatataactagttatagttcatatagattcatataactagttttaagtgataatagtttcttcctttttttcctccaccatctaaccagatgaagataatagtttttaatagctcaccgtaaatttcaaggtactcaagttaaattgatctagatgcttgagttgaaatttttctatcaaagttcaataacatgcttacattccttattaaagtataaaagtcctataaacacacaaacttgagtaagtactaaaactagtatcagtattgtcacaatacaacatgttatattgtaacaagagcatttgctgagaactgtgcttgttactccagaatgttgcttctatggttgtacctttcaactttgcagatcatttggaaggaggagagatttggggtggagacaattcggtacttcattcacaggatgtaaggaggattaagtaaaataatgctggctaaaagtccttatttagcatactgcccaatgctcactaaatcataatagctgtttttaacatttggtgaagaatctatttaacaggagtgagttgaggggcataggagatcatgtgagtgtttaaagtagaagcagcattccccattaagaagagaaatactgtggaagagcaaagactttaaaacacctgggttcaaatcctatttgctacataatggctacttttaacctattgaacgccagttccctcatttgtaaaatagggacaatatttaacctatttacaggttgtgagagaactaggcacctagtacagggtaatgttggcacatggtaacctttaataaactgttgctattcaacaagctattagatgtcactaggcagttaagcaaaggaagacagcttttgcttggtgtgacaatgaaaatctttctgatttccttcttggaagagttccctgaagatatgtcattgtattgacacctttatttttgctaacctatccctctaaattctggatattgtgtgtgccacagctttttttcttccatattcctgcatttatttggcacctgttgtgccagtaatagataaggggctgctaagggaggaggcaacctgcactggcttatagctgctaatgtcagttcctatagcttatcgtcagtgttattcatgtggtaaaagggtgagaaagtactggagtctaaagaaacaagtagaaatcagtttgtagctattaccgttctacctgctaacaactcctgttttcaagttattatgtacaactttaggtagtttctctagccttaatcgtggtttctctgtattgagactacttttgaattctatgaagtacagccttagatgtacaggctactttaaatttttgcctaaaataaaaacattctctccaattacatatgctggggaggaaacacctgcttccgacaggtttaaagcttggttttggactttttgtgagagttccttatgtgtgcagtaatccaaaatttgtatagttgccctttataaaagtacattaatctagtagacaaatctccatgtaacttaattacatggcatcttctaatccttctgtgataagcagaaatgtaaagttttattcaagttaaggcaaactaacttgtatacactttccatctcgtgtttttcttgttgttgttaagtaggataagttctgaacgtcgaaaagaaaagtctcgagatgcagccagatctcggcgaagtaaagaatctgaagttttttatgagcttgctcatcagttgccacttccacataatgtgagttcgcatcttgataaggcctctgtgatgaggcttaccatcagctatttgcgtgtgaggaaacttctggatgctggtgagttattttacaagggtataaataggcctgaaaattagaagttagaagtaaatagaaattatttttagaaggtggtcgcaatgttttgattttgtatacctctttatattgtgatatgtacacgtttaaaaatttttctgtaattctcactatttttatcaagcttcatttttttctcatcagttattctttgaaataatcattctttatgcacataatttgttttgctttattctcttaaacatactctcaattcttttctaatataacatcctttttattacctgcttttaaagctttagtcaggaataagatactggcttttcccctcccccctttttctcctgttccatctacctttcttcctttaaaaaacatgactcaggccgggcgcggtggctcacgcctgtaatcccagaactttgggatgctgaggcgggtggatcatgaggtcaggagttcaagaccagcctggccaagatggtgaaaccccatatataccaaaaatataaaaaattagatgggcacgctggtaggtgcctgtaatctcagctactagggaggctgaggcaggagaattgcttaaactcagagggcggagcttgcagtaagccgagatcaagccactgcactccagcctgggcggcagagtgagactccatctcaaaaataataaaataaataaataaataaaaaacattactcttctttcttcttctatggtttgctttgctgcattactttaatcatgaaaagcagctggcacatctaattatagtttttctagcttctggcctgcacttttctgtgttgaaatggctgtatatattaaataaagtgtctgcgagaaaactttgtaaaaacatctaaatattatatcatttaagtacaactttttaactaattattttcctcttcttgtgccctttttaggtgatttggatattgaagatgacatgaaagcacagatgaattgcttttatttgaaagccttggatggttttgttatggttctcacagatgatggtgacatgatttacatttctgataatgtgaacaaatacatgggattaactcaggtaaaatgcacacatattaagagctcttctatatgtttttatgattttatgatctagccctaatttttaaaaatgtgtttacagtttgaactaactggacacagtgtgtttgattttactcatccatgtgaccatgaggaaatgagagaaatgcttacacacagaaatggtaagaaaagtctgttgtttgatttaatgtgacaggtggttttacataataagatactattgctaattattaaactttgctattgtacttacccaaggcaaaatgttatttcatgtttaataaaatgtctattctttgttaaaactattattttagtttttaggaatttcattttgaaagcccacctaattgcataaataattgtgtgggtgtgagaaataaaatggaaaagtaaaatcatgaccaagagagttacaaataactttttttttttttttttaagatggggtctcgctcttttgcccatgctggagtgcagtggcacaatcagctgactgcagccttgaccgctgggactcaagcgatcctcccacctcagtctcccaagttagctgggaccacagacgcgtgctaccatgcccagctaaatttttaaaaattatttgtagagacaaagtctcactatgctgctcaggctggtcttgaactactgggcttaagccatcctctcacctcggcctctcaaagtgttgggattacaggcatgagccaccacgcccaggctaccttttttttccttttctttttaaattgtgataggggttcttgctgtattgcccaggctggtcttaaactcctggactcaagtgatcctcctggctcagcctcccaaagtgctaggattataggcatgcgccaccacacctggtggagttaaaaattaaaatacaccattaaggcaaggagaaattataatacaaatggcagataataggactttagacagtcattaaagttgaggtgccagtttgagtctaaggcccaataaaaaaagttcaccagaattttaagacaaacaactgcttatttgacttctttggatgttctcaataattcgagaccgtgtagttagattataaagtattacattgtggatgcccacatattaacaaaaatagagagtaagacctctaattcttaggaattaattgttaaaaataatcaagtgttccaagattttttggaaactacctcttgaattaaaaaattaaagtctttctacatttttatcttgttaaacagtgtatactgatcataattatttaaaaaatcatgtgttctaagatttttggaaagtacctcttgaattacaaaaacaagaaagtctttccacatttgtgccttcttaagcagtgtatactgatcataattgaacttttcttcatgatggaaagttaccacaaggaaaatttcttatgttctgctgttctttgttgctctccaatttaagtgcatacgtttgtttgcttctatattataaaacctcaaatttactttttgtataatttttgaggttttctttttcatctcatttattataataatagctaacctccattgagagaatgctgtgtgccaggacactgttcttcctattttatatgcttttaactcctttattcctcacaacaaccctgtgaagttaactgttagacaatttctattttactaggaaactgaggtacagagttactaagtaactttcccaacattatttggttagtaaatggcagagcttgggctgaacttcagtagactggcttcagagtccacgctcattagtcctttggagcgcttttcatattcttgaattctcacattctgtcttttttcactctgtcagcaggacctgactcctgtttttaaatttcatattgtgtttttactgttaatttggaaaacaaatgcatactttttagaattctgtataaaggaggagtaaatatgctgtgaacaaggacctaagtgggttgtcaatgagtttaatatatgagttctaatgtgcagagttgaggtttatattgactgctcagtgcttccctggggctagactataaatggatggatattaggaagtcttgttctgatttggtaatgatgttaatgcattattctaaatcagatagtcttaatatagtttaaatgtatgtttcgaaccaaatgttcttttttaaagcacacaaacattttgaaatcattactaatgtggttaatgaattattgatgttccattgggaaactaaaatgcagatttttctcttttagaaatcagggactattgcaaagcatcacattttagtgatacactgagagccagtggtgtgtttatacaaatagtcctattttccaaataaattctagaaaaatgctttagaatttataaattatacaaaatatgacttatttttagagagtttaaaatttaggtttttttaatggtttgtttttgtttgtttgttttttgttttttttttcctcattaggaaaacactagtacttttcagttaccttgatttttaaattaatctgcaggtccccattcaaaggccttgggttcctttcaaaggtcagtataattcaagcttagtttatgaaggactgaacatacccaaaggattttgcatgtggatctttactgccactaccacaaccatcaacacctacacacacacgacacacacacattctctctctctctctctctctctctctctctccccctccctcccgcactccttcccttccccctcctttgctctcatggcatcttttaaaaatatactcttaaatccttccagggagggcaaattcacttcttaatctaagtaaacccaaatggcatgcatcagcaccaggactgcccatctttcctagttccattattcatagagtataggctggaattcatcttgttcctcaagagtccagcatttctagttaaccatgcctacatttaaacttactctcatttcttttctactttacagtgttttttcaatatactagcattacagtttccagatttgatttctctcctgtcttatttccatcagttttcaagtctattaagattctacctcttcatttgtcttttgccaccattcttttccctcatactctactggctcagccctctcattacagtcacctaattctaacatatatattgctgctaagttaattttccttaagttactgattgtgcttttttaaagccccttgttgaatatttaggcaggactccatgtggacatccacagccctccgtggtacagccctaaccttcccttctagctttgccttactactcttctacgtgtactctacattgtggacaaactactatatgctgtttttcaaacatgtcctatttttcctacctctgtgcttttcattctcttacttctccttggaatacccttctaacccatctctacttactgacattctaatgtctctttttctaagcaagacttcttgatttcccttgactagaaattatcttctaagctctccctatccttctttaaagcatttttataagtctcaagtaccaactctacattgtgtttttgttgaccttactatatctactacatttttaacttcttcaggaaaggtggcgtatcttactcatctttgtattgcctacaatatctagtccaggttctgaataataaatatttttatatgtgttctgaagcacactgaccaatgaagataagaaatcaagaggctagttccttattttttttaatttttttttttgagacagtgtctcactttgtcacccaggctggagtgcagtggcacaatctcagttcactacaacctctgcctcccgggttcaagtgattctcacgcctcaacctcccaagtagctgggattataggcatgtgccaccacacctagctgatatttatatttttagtagagatggggttttgccatgatggccagcatggtctcaaacttctgtcctcaagtgatcttcctgcctcagcctcccaaagtgctgggattacaggcatgaggcataagccactgcgcccagcaagatgctcttttctcagtcacctaaatataatctcatttttagttatagaaggtttgaaattggagtgaatagactttacttaattctgactttatttctgtagctttttttttttgagatggattctcgctctatatcccaggttggagtgcagtggcacagtctcagctcactgcaacctctgcctcccacgttcgagtgattcccctgcctcagtctcccaagtagctgggattacaggcacccactatcacacccagctaatttttgtatttttagtagagacagggtttcaccatgttggccaggccggtttcgaactcctgacctcaagtgatcctcttgcctcagcctcccaaagtgctgggattacaggcatgagccaccgtgccctgcctatttctgtaacttttgataagtcatttgatctgttgttgttgttttctcatagtaacaaagtagaagtaattttctgcctgctttactagataaattaaggggaaaaaaataagatacgtaaaaatgttatttgttattaaaaagaaagttgttattttaaaggttctataaagacatagagtgcttattagaaattgagctaacacattcaggaaaggataggaagagtttgctgaagttctttctttagggattcttgtgtaccgatagcacagttaaagagcaaactcataccatttttatatttctgtgtatttgactaagcttactggcttcaatgattaactgttatcccaaatatggattatctttcagccaactcagggaatcacagctactgagtagtgtgtgtcagatctcttgggtgtgctggagtgagtaaaaggggaatgaattactgtgttcatgctgagacttaattgaacgggtattcagttgatctaggtgatgggcactttgttacttttattgtaacaaatttgtatatttagttgctttaaaactttatttcatgctttcattaggccttgtgaaaaagggtaaagaacaaaacacacagcgaagcttttttctcagaatgaagtgtaccctaactagccgaggaagaactatgaacataaagtctgcaacatggaaggtaagtgaaaattatttgtgattgattatacactttatttatacatagacattgtagtattaagataactttagaattgtgagggaaggtttacagttccatggtgtttggttatgtaacatttatatcttcaactcatttgcatgtgatctccaaaatgcagaaccgtgtagtaatttgccaatttgaggcacaaacttaaattacgtgaattgtggcactggtgttccaggcttaatcagttggctttgccagccacacaatatttgaatcctgatagggcttaattttctattaatcatggttttatatctttgttcaatgttgaaacatagtcatcagtgcaagaaataactatcaaacagccatgatgatgagatgaatgaaaaagcagcctagactttatacgaggggaattttttaaagagtaatgtataggccctgggcaggaagtaggtcataggtggtatcataggaaaaatgttcattgattttcaaaaacgtgattaatccactagtgacagtaaattttatcaaagcttactggccatgtcagactcaactacttatctctgctttttttttccctagcattgtaaatattttttttaactgctttgttcttcatacacaggtattgcactgcacaggccacattcacgtatatgataccaacagtaaccaacctcagtgtgggtataagaaaccacctatgacctgcttggtgctgatttgtgaacccattcctcacccatcaaatattgaaattcctttagatagcaagactttcctcagtcgacacagcctggatatgaaattttcttattgtgatgaaaggtaaattagatctaaaatgtgaatttgaaatttttaattagtctacagcattactgaatattcaccatagcaaagattcagcgctggccatgcatggtggctcacacctgtaatcccagcactttggaaggctgaggcaagcggggggtggatcatctgaggtcaggagattgagaccagcctggccaatgtggtgaaaccccatctctactaaaaaatacaaaaattagtgggacgtggtggcaggcactactcaggaggctgaggcaggagaatcgcttgaacctgggaggtggatgttgtggtgagctgagctcacaccaccacactgcaagcctggatgacagagcaagactcccatttcaaaaaaaaaaaaaaaaattactcaatgttaaactatactttccactaaattgaacagaatgatacatcctataatattagattaactttgtaaattaattcagccacatttattgaacatttactctgtactatgaacacttactttactaggtgctatccagaagttaagatgagtctttttttccccaataggggctctacttacttagagaatttcaaagatatgcagtgtgtattttgagcaaagatagattaccttaggttggggactagaaagccaagtgtttgtacatctcttcatcctacatattttccctgagaagcttcaaccttgcccatggtttctattactatttcccacatttcttcctgtaactaattctatttaattgccaacttaatatttctatctggatattcttctgtattgtaaactaagtattactgtaacaactgtactactactgcccccaaacaacatcatcatcaaaaactgcctttcttcctataatgcttattgtggtttaatacaccaccatacacacatgactccagcaaaactttggaagtcatctgtaacttttcttttacattcattggctacatacagttggtgtctaaatcttacagatttactatctacatatatctcttgatccatttcctcctttccatccttgcactcctgccattgaattcattagctcattattactcttgacttgagttgttggcatagctgcctttttgccaacagatttgtacccttataatctttcatctaagttgccagaaagtgggtgtcctaatgtgaaaatcagatcatgtcattctgttgttgaaaatgcctcaaatgcttccctccatctttgcacacaaaaatattttgtttataaaaatactagatgagggaagtaaatttttcatttatcaaaagaagatgtgtattttagaagactgaaaaaaaatagacctacacaatacaatctaaacttagcatggcaaacaaagatatttatgctctggccctaactctgtctttggaatcagatgttagattcactcatggcttgcagctctgatacttacaatgtggccttggccttggtacttaactgttgtaaaattcacattccttatctataaaataagaatcatggctgggtggggtggctcatgcctataatcctagcactgtgggaggccgaggtgggtggatcacctgaggtcaggagtttgaaaccagcctggccaacatggtaaaaccccatctctactaaaaatacaaaaattagctgggtatgggggcacatgtccgtaatcccagctacttgggaggctgaggtaggagaattgcttgaatccaggaggcggaggttgcagtgaaccaagcttgcaccactgcactccggcctgggagacggagtgagactccatctcaaaaaacaaaaacaaaacaaaaaaaagacctcagaaggatgttgtcaggattaaaggagtccattgagtgcctagtacagatagtgaatgcttcactactggtgtcaactttaagaaaatgaatatagaaaagctaagaattattttaaggtgtttactactagcatgtaaatgtatgatgggacagagatttccatcctattttgaggaattattttttatttttttgaaaacttaaggtaacaaagtagagaggaggccagggagaaaggaaggtagtggagcaaaaatgagaaagggagtgacattcccctctagttatagcagaaaattagcaaaatgatcatgacaggaggtaacagtaaagacagccagctcatatatcaaccaagacagttttgagtttgaccagcagactgttattttctggtttagagctctttccaggaacttcttgcatctataacccctgagaaccaagctatggaaaaaattttgctcaattttaagaaaatctaacatatcaagctcctcaactccaaaatattccacaaatagctgctatttactatactgagtaataatcatttaaaattattcaacactttatttgagcatctactatgttcatggcactaaagtagaaatgaagatgaacagttcctgcctcaaaataaatgagtagtatactgctttagatcatgggtttcctagtccattaaaaacactttttggtcatattttctggacaccccgacccttttggtatagaatataacctatgtaattctctaaagttaaattaacctcacttttcttgctctaatatgtgtaaaactgaccttctaggaaagcatatacagtttatatttttgacttcttggtatcttttagtgatagacatacctcagattgagaagcactgattgacattagattaaatcagagcttcctatgacaatataaacaataccttcattaatctgatccccctacctacttcttcagcatcatctcatatctgtctccactaatcatattatagaatctttgttacctgcaccatgttaagcatttttaaaaatcttttgtttataccatacctttttcctgaaagcggttttgcctttcctttgtctctagtcataagtctcctataagaggctgttcctcattctaccattcctttgcatggataggattccatggaatagattctcatcactgcatttatcacattatttcctaagtagtacagtacatctactggaagattagccacgtattgagttttgtctttgcattttcatgcctagaataatgccgggcacacataggcatattaagatttgaatagtgaaaaagtttttaattccatggggattttatttaaacagaaaaatataagaccaattagaattatttttaaagcataatttcaagaaatatgactgattttgtttaaaaacatgttttcctttataatgctgccacctggtgttgctgtgtttagagatgtccctttgtaaagaattgagggtttgagttgagtttggtttggtttttggcaaatcagcttttcctttgtatatttattttgtaataaactatggaagatcttgcctttaagtgtgagaacacaagcaatgttacttttatacctttatagaatatcttgcctatgtccttcctgtagttaggtagggttttttttttgacacacagcatgttatataaggtttgcttgcacctcggtaggaaagtcctctgaaatctaaaggctgagaatctaaaagcttaactcatgttttgctcctagaaagacttgagaagagagtatttctgttcagcatggtactaagaagacagctttctcttcctcatgtcatggttgccatttcatactgcttacagagaataagatctagtctctgtcttaaataaaggtctactctctgccagcgagctagatagggtaattggattgttttccaatctattttcatttgaaatattgttttatctgaaattactcccataatttcatgtaatgccaaaaactaaactaagtacaagagcatcttcaaaaaccaacataattcctttagttcccatttagtgtagatgctctttggttgatgatattagaattgtgtaatggctattgatctctcaaagtgaggtgttgcctaggggcttaaaagttactacataaagaatttggctttatgaagaaatgttacagattttatctatattttaaaataagtgtaagtgactacctttataacttttaccatgtagtttagtagtatttcttatctgtttattaataccctgccttgttaccaaaagtatgtataatgagatgtaataagaataggtaacaagtaggctgggcacgttggctcatgcctgtaatcccagtactttgggaggccaaggcgggtgaattacctgagttcaggagttcaagacgagcctgaccaacatggagaaaccccatccctactaaaaatacaaaattagctgggcatggtggcacatgcctgtaatcccagctacttgggaggctgaggcaggggaatcgcttgaacctaggaggtggaggttgcggtgagccaagatcacacctcattgtgctctccagcctgagcaacacgagggaaactcttgtctcaaaaaaaaagaccaggtaacaagtttgggtgaacaggattaaagagttaaataacaggaggaatctagaggacttaaagaaatgtgtggtgttggatttaataactgtagttgccaaaggtgaggtgtaaatttattctaagcaaaggaggatgctcatttttgaaaattcacttgtccataagattaatgcctatcagttaacttgggaggagaaaaatttttctttatcagtgtctcccttttttttcttaaatcttgtattttttactaacagaattaccgaattgatgggatatgagccagaagaacttttaggccgctcaatttatgaatattatcatgctttggactctgatcatctgaccaaaactcatcatgatagtaagtacaatggaagaactcagagatattctaattacttaactgttgcaacctctgtacagtttggctacccatctaattctctggttaaaagttctagactaaatgtgttaacaggcctattcagtagagatcttgaccattttgtgttttgtatgtgttgcaacaaatatcagtaaaaatagaatcatttaatcatagaaaaaacttcctggcattttaaatacaaagacttttgaaaatccaaatattatagagtattgaatagcataattttcagaattcacataaatactcagaacagtggttggtatgtaaaaggcactcagaaagtatttgtacaatcaatgaatgtgaaggtggtgaacatcacctttggtaataagtaccattttaaaaaatgcttataagtgcatagttaggtatttatatttatgggttcatgaaatattttgatataggcatgcagtgcataaggataaatggagtacctatcacctcaagcattatcttgtgtgacaaacaatccagttatactcttttggttatttttattttattttattttatttttttcttttgagacaggatctcactctcgcccaggctggagtgcagtggagcaatctcagctcactgcaacccccgcctaccgggttcaagagattctcctgcctcatcctcccaagtagctgggattataagcatgtaccaccatgcctggctaatttttgtatttttagtatagacagggttttgccatgttggccaggctggtctcgaactcctgacctcaggttatccacctgccttggcacccggcctcttttagtttctttaaaatgtacaattaaattattttttactatagtcacccaaaacaagtacctttgacataagatttgattctgaattttactcaaatgaatgttaagatccccaagataagttaaactttggactatctcacctgtttaatctgtacctatgcatgacttcccactgtgcttgaggatacctgaatatcactgagtttgtgtgactgatcagccttgaactcaagagtaaatccaagtctgcagtcaggacaccccaatcctcaaaataataccatcattagcatttatttagtactttctcccaaatcagtatttaatttaaattgccaaaagacttacaatgtggtatcaatttatatttaaatatgctacatatagctttttaaagcatctttggttctctggaaaccatagtcagaatttaaggaagttattgtggcaccattttcttgaaaaaggctattgattattctctaatctgacaccaacctaagtcattaaaggaattttagttactgaagattgtatattcatgaactcttcacttagctcactggcagcaaaggagttttatttagggggtttgaaaaaggaaatgggtacattttcagctattctgggacgcactgtcagaatgtaagcagttacaactgattccactaaataaacatttgttttccaaaacaatgatgaacattcagcatctgttcatttaattgaaaattcaaagttaaaatattttctctgcatgattctttttcttttcccccctagtgtttactaaaggacaagtcaccacaggacagtacaggatgcttgccaaaagaggtggatatgtctgggttgaaactcaagcaactgtcatatataacaccaagaattctcaaccacagtgcattgtatgtgtgaattacgttgtgaggtaagtaagtttgagaaataaacatttttggggaacaaatagtaattctttttggatactctgttcatttataggaagataagataataaatattaactaaattttaattcttttacatcgctaccaaattattattttctatactctgacctaggtttccagtccagctattccacagtgatgctgctaaacactgtcagtagttgtctatccccataccttcactcctatttttaaaaagaccatgaaaaaaataccagatccattgattggtttggtctaattatacagatatcggcatatactatctcaagacagctgtgttctttttgtaggaagaatcctggcctagatttgtatcatagctctaccactcattagctccctgaccttggggaagtctcttcatttttctgaatttcatctatgtagataatccttcagaaggttataatgaaaattaaatgaaattctatgagattagggaggggggagggatagcattaggagatatacttaatgtgaatgatgagttaatggatgtagcacaccaacatggcacatgtatacatatgtaacaaacctgcacgttgtgcacatgcaccctagaacttaaagtataatttaaaaaagaaaagaaattctatgagattaataagctatatgatgtaatacatggctcttgtatattcatgaactcttcacttagctctttggcttgtgaatattatgtacatcaaaatttaatttttcatttgatctattttactagactcctgccccatctagtctacctgtccacattattaccacattctagtccatcttgcccattactaccaggctaagctttctagtgtggatatgtcatcatcttattttccttagaattttagcgatctttttatcatttccaagataaacacttgcctaggtgtacagcatccttgtttaccatcatactcacgcattagagatttagccttccctttaaaatctagggtcactcctcttaggaagactttgggcagtttttatttttgctacttctgacaccatcctttaatgttttaatattagtgccacagagttcttttgtgactttaccattatgtaagaatcttccacttggaatgtctttctcttcctcacaccccagtctgcctagcaaatgccacttgatcccaagtatcagcttgttagcttctcagtgaagcaagccttctctattttagcagttatcacagtgtattttaattgtttacatatctactttcacaatgggttataaatttcttaaggtcaagggttggctattttaatctttgcattatcagttcatttcagatagtgaacatttaatacgttaattaaaggaataatttacatttaagccaaacgtgaagataaactattgctcatcatccctcttcagccgtatcctgtaggtggtatcaccttatattcttaccaccaaagaaaatatggcccctctcttagaaagatcttaatcatttatctgtgtatctttaggactatccttagatcatgcctcacatattgatgccaaagagttcttttgtgccaatttcataatgtgtgtcagcacaacaattctgaagatttgttggtgtctttcatgtacttgactacaaattgccttgccattactactcttctcaaaggatatctgaaattctttttttcttttttttttttgagatggagtctcactgtcacccaggctggagtgcagtggcgtgatcttggctcactccatttcccgagctcaagtgattctcatgcctcagcctcccaagtagctgggactacaggtgtgcaccaccacaccgggctaattttttgtatttttagtagagacagggttttgccatgttggccaggctcttgaactcccaggctcaagcgatccacccgcctcagcctcccaaagtcctgggattacaggcatgagccaccacgcccagcctggatatctgaaattcttaactgaaattagtcaaattatcttgtactggggattttttttttaatttcaacttttatttttgattcaggggatacatgcataggtttgttacatgggtatatcatgtgatgctgaggtttggggtacaattgatcctgtcacccaggtagtgagcataatacccaacagttgttcaacccttgcccctctcccctagtagtcctcagtgtctattgatgccatctttatgtccacaagtaacccagtgtttagctcccacttacaagtgagaacatgcagcatttggttttctgttcctgggttatctcacttaggataatggtctctggatgcatccatgttgctgcaaaggacattatttcattcttttttatggttgcatactgtggattttattgggtctttattttgtattagcattttaaaaccctaaatgtgacacagtacgcatgagtgatcatgcatctcaagaaatcttgaaatgttcctgtccataaagcagaattttttaagagaccatttcacagtctcccttcccctcactgtatcaagtgctcatttgtgaattaccaatttctcttgttttgacagtggtattattcagcacgacttgattttctcccttcaacaaacagaatgtgtccttaaaccggttgaatcttcagatatgaaaatgactcagctattcaccaaagttgaatcagaagatacaagtagcctctttgacaaacttaagaaggaacctgatgctttaactttgctggccccagccgctggagacacaatcatatctttagattttggcagcaacggtgagtagttatttttgttaatcccctaaattgtgtctgttgctacaagccccatttcaactaaacattactttacggtttttgttggtaatcatttggacattacaagctaatatatgtttatagttttcttaaatgtatttgcttaaatatttttgcccccgtaatttcttaccattcttgcttttttatactgttggaaattgtgcttcaaagtgtccttaaggtatttcttcttcccacataaatttttcctggctactctatttctgtatcctgctgtcagattttctccacagtttagcagagttatatggaagtaggcattgttgcattaaaggataaaaaagtagtcatactataacatcaagcattgaagatgaaaactgcaattttaaagtagagaacattttaatgtataaaaaggttggtattgccttttgtcttttatgccatagagattaagacgcggtatcaatagtggattgtaaaggtaactcagacttatggttatactatactattgtatgtaaactttctgatgaaggaaaatttggtgacattttgttgtttgatgaattagacaaaccttttgtgaaaaagaacataaattttttatatgtgaaaatccttgtggccgggcgcagtggctcacgcctgtaatcccagcactttgggaggccgaggcgggtggatcacttgaggttaggagttcgagaccagcctggccaccatggtgaaaccccgtctctaccaaaaatacaaaagttagctgggcgtggtggtgtgcgcctgtaatcccagctacttgggaggctgaggcaggggaattgcttgaacctgggaggcagaggttgcagtgagccaagattgcgccattgcactccagcctgggcaacagagcaagactctgtcttgggtaaaaaaaaaaaaaaatccttctatactttagattgactcatattttttccccacagacacagaaactgatgaccagcaacttgaggaagtaccattatataatgatgtaatgctcccctcacccaacgaaaaattacagaatataaatttggcaatgtctccattacccaccgctgaaacgccaaagccacttcgaagtagtgctgaccctgcactcaatcaagaagttgcattaaaattagaaccaaatccagagtcactggaactttcttttaccatgccccagattcaggatcagacacctagtccttccgatggaagcactagacaaagttcacctgaggtaggtgtcatgatataatcagaaagggacaactttcagattttaacattcaagaatgtatttataagtttgattcaaacacttatttgaaccacaaattacatttgtgtgtgtgtttgaattttagcactttaaaattattgcaagagctactgcctaacctagacctgagcacatgttttaggctcaaagatagtcaggaacatgggaagaaactagcttaatataaaccaaaaggtgaaacgtacattgtttctctattatttatatcagtaggacaaaaacatcttgaatttggacatttaaagagaatagtactaagtgtgctcaaggtagctacagcctatacctgttaccccttttagtttgttttattgtgttttgttttgttttgagaaagagtctcactatcacccaggctggagtgcagtggtgcaatcacagcctcaacctcccaggctcaaatgattctcccacctcagcctcccaagtagctgggactacaggcctgcatcaccatgcctggctaattttttaacctttttttgtgtgtgtgtgtggagttggggttctcactatgttgctcaggctggttttaaactcctgggctcaagcgatcctcctgccttggcctcccaaagtactaggattacaggcgtgagctaccatgcctggcccattacccctttgagttggagaactgtctggtagcaatagacttacgagggtttaaatgggaaaggaccttataaattctttgcccaatttagtctaatttccatcactattttgaaattttgggtaagtataatatgaaaataacaagtgttacataaaataaatacttagtaactggtcttttttattctggatctgtcttgatattaattgtcctatgaacacaaaaataatctttaaaggctaggctggccaagacttagagatatcacacagggctctatttctaaatctagaatgattccattttagggcttcctacatctaaaaatatgctcaggagtagggcaacttagatctgaacattataacttgataaatgaggcataaataagctttaataagtggtaaataattctacattaggtatttgttgaataaaactgacaagctaagagtaggggatttgacatctcacagccttgtgttgaatgaatatatatcctatgctctggttgcttaatttacccagaaaaaaaaatgtttgattcatcttggtttttatctaacaaaagtaaatctaacaaaaacgttagaatgaggaaagcaaaatttcttgtttagaatacacagctatagttttttgttaaacttcttgcccagaactcttaaaatagtaataatgtacattcgttcaggtatatgcaggtaaaataacttaggtttctactcccacccccgacagtaacagtgagatttttaggtagctcagtcaccacaggagtgtgccttctcagttcaaaggtaaattccagtgaatgtagcatctagttaattggtcaattaggtaccattgtgggatgtgaattaccaaataggttttattctttagaataaggtgtttcttttcatctcaattttgtaaatgatgttatattacatagtcagaaatatatatattggcaaaattagttaccagtataagcttcaaaatgtcactattttcacaaatttttttttttttttttttttttgacatggagtctcactctgtcgccaggctggagtgcagtggcatgatcttggctcactgcaacctctgcctcccaggttcaagtgattctcctgcctcagcctcctgagtagctgggattacaggcgtttgccaccatgcctagctaatttttgtatttttagtagagacgaggtttcaccatgttggccaggatggtctcgatctcttgacctcattatccctccaccttggcttcccaaagtgctgggattacaggcgtgagccactgagcccggcctagttaaataaaatttgataaacacgatggacttggttgtgtgttttctggtttttctgagatctagtttgaaaattctgacaactagcaaagtatatggaagcttcttcaggaaatagtaaacatatttctttttacagcctaatagtcccagtgaatattgtttttatgtggatagtgatatggtcaatgaattcaagttggaattggtagaaaaactttttgctgaagacacagaagcaaagaacccattttctactcaggtatatgaacttatttgttttatattaaatttcattaatttttagtctgaagtgactttgagtttcacttgttttttatttataaggtgtggccattgtaaaaactcatgtatttgctgttttaaaggacacagatttagacttggagatgttagctccctatatcccaatggatgatgacttccagttacgttccttcgatcagttgtcaccattagaaagcagttccgcaagccctgaaagcgcaagtcctcaaagcacagttacagtattccagcagactcaaatacaagaacctactgctaatgccaccactaccactgccaccactgatgaattaaaaacagtgacaaaagaccgtatggaagacattaaaatattgattgcatctccatctcctacccacatacataaagaaactactagtgccacatcatcaccatatagagatactcaaagtcggacagcctcaccaaacagagcaggaaaaggagtcatagaacagacagaaaaatctcatccaagaagccctaacgtgttatctgtcgctttgagtcaaaggtatttatatgtaacattcaagttatagttcttttattatttttgagataaatgtatgtgatagtacatgatttttaaacttatagcaaactttctgatatatatgccctaacgcaaattcttgagaactcaaaaaactttctaaattaacctcatatattttttctttttctttcttttttttttttttgagacagagtctcgctttgtcgcccaggctggagtgcaatggcatggcaccatctcagctcacggcaacctctgcctcctgggtgcaagagattctcctgcctcagcctcccgagtagctgggattacaggcatgcaccaccacgcccggctgatttttttggtatttttcatagagacagggtttctccacgttggtcaggctggtctcaaactcccgacttcaggtgatccgcctgcctcagcctccgaaagagctgggattacaggtgtgagccaccatgcccgctcctattttttctaaaataattataaattctaaaattacctatctaaatggaggagggtcttctgacacctttaaaataaaatccagctcagtactgtaaatgtgtttacagaacttgtttaaagttcttacagttgtttaaatcagactagttaactaccctcactacttagatgcttccatttcttagagctcttttttaagcttatctgaagaaaagcccttccaatttaagggttatttccaattgcacattccaaattgagccttccatcttcagcattcaatatagatatttacaggcccctcttttaaaattttattatagttaacttgtattaaagttgcttttatttttcattacgtatttgtagaacattagctatatatatattgcaggctacataggttttcaaactgtacaacaggaatctaagcatgaattgttacttctatggagctagttcaaacaaacatatggacatgacccaatttttaagttatactttctgtatataatttgtaaggggatttcacatattttaagtttgaggctatagctagaagaaattaagttttatctaataagtgtgtggaaaagggaaatgattccttctctactatgtctagactaagccagatatcaatagcaataggaaagaaccactgtcgtagccagaacacatagcttttttccctgcctaacattcccaccttgacctagagtgctgggagaggtcttttccctaagcttggaaaagacattggggctttagatgaactcagaagtactttacattactttatttactgtgtcacttactcacttttgactctgagctccacgagggcaatcacagtgtcttgggcattttagtgatactaatacttagctcatgacctaatgtgtagtacttcctcaataaatggttgttgaggcagggcgcagtggctcatcactgtaatctcagcactttgggaggctgaagcgggtggatcacctgaggccaagagtttcagaccagcctggccaacatggtgaaacccggtctactaaaaatgcaaaaattagctgggcgtggtggcacgtgcctgtaatcccagctactttgggaggttgaggcaggagaattgcttgaaccctggaggtggaggctgcagtgagccgagatcgtgccattgcactccagcctgggcgagaagagtgaaactcggtttcaaaaaaaaaaaaaaaaaaaaaagttgttggactgacagatgcatgaatacagtagtaaaaatgacaatcacttataagttacagtttactatcagctacagaggatgggatatccagttttctgaacaactgttctcttgtacttgtcaaagccaaagtgtaacaacacatcaagtcactttagcaatttatttttgagacggagttttgctcttgttgcccaggctggagtgcaatggcgtgatctcggatcttggctcaccgcaactgccgcctcgctggttcaagcaaatctcgtgcctcagcctcccgagtagctgggattacaggcatgcaccaccacacccagctaattttgtatttttagtagagacagtgtttctccaggttgatcaggctggtctcaaactcccgacctcaggtgatccacctgcctcagcctcccaaagtgctgggatgacagttgtgagccactgtgcccagctagcaactgtttttaaacattagttccaatgtagtgtacactgaaaacttttatgaaaggaatttcaaaaattaagataaaccattaaaaacgtaattactaagtactactactactacaatgatatttacataatagactgagttacatttcataaagacaatatatctgtataagaatttttaaacttccctgtctatataatagaagttttagagaaattttttaaaaaccaaagaaaactgcaaaataagatcacttacctatttggcattctcaactgtctggaacagcaaggagccattatgattatgcatttggtttgtggggtgtcttgaaaagtcaaaataatgtaacaaagctgatgtactttactcattagaacaattcttcacaatttaatattaattttagatatacatagttcatgtttgataaccagatcaatactgagtgaaaaatagcatagtgggaagagcaggggaggggaggtagggatctggagacctagagtgtacttccatattgcaactagtgagcagtaggactttgagaaagttacccaataggcctcagggttctaatttataaaatgggtatgatatgcctgccttatctgtcttgggaacttaagtaaggttaaaatgaactaatgaacttgaaatgttttataaactgaaaatgctatacgaatgtgagattgatcttgtatttcaatagtcccaacaatatcactgcattgttatattaggtggaataaaaggacaatatttaactgttttgactctacaatagtgtcaatttagttgtgttcagctctattttataaaatagggatacgcatactgtagaaaatttcctgttaaattaagctttgacggccaggtgctcacgcctgtaatcccagcactttgggaggccaaggtgggcagatcacttgcgctcaggagtttgagaccagcctgagcaacatagtgaaatcctgtctctacaaaaatatgtatatataaattagtcataatcccagctacttgagaggctgaggtgggaggatcacttgattccagaggcagggcttggttgcagtaagcagagatcacgtctctgcactccagcctggctgacagagtaagaccgtgtttcaccaaaaaaaaaaaaaaaaaattaagcttttacttttaagatgataaactttagtgatcaggaaagttatcttatgtatattatattccttaatattggagaactaaagaattatgtattttctttaaaagcgctcactggatattttttttaaaaacgctatattttcatttagaatttttttcttttcagaactacagttcctgaggaagaactaaatccaaagatactagctttgcagaatgctcagagaaagcgaaaaatggaacatgatggttcactttttcaagcagtaggaattgtaagtatgagtagtaggttttgcttttctagctaatgtgctatttcgtgtgtgtgtgtgtgtgtgtgtgtgtgtgtgtgtttccacgtttcttccaaatagtaaagttatattttcagaagttatacattgggtttttttactctgtatgcactggtttttaaaaatacaaatgtttaatacatacattcttggtataaaaattccaaacaattccagtgtattttgagttaaaaagtgaagttctccccttactccaccctgaatatcaccaccaatctcattctcttccctttaagttactttgccttattaaaagaactgctattggccaggcacagtgcctcacgcctgtaatcccagcactttgggaggccaagatgaggatcacttgaggtcaggagttcgagaccagcctggccaacttggtgaaaccctgtctctactaaaaatacaaaaattagccaggcgtgttggtgcacaactataatcccagccactctggaggctgaggcaggagaatagcttgaacccgggaggtggaggttgcgatgagctgagatcaggccactgcactccagcctgggtaagagagtgagagtccatctcatatttaaaaaagaactgctatgttttggggtaagtcaatggtggtataatacattctgatattttcaaactaaattaactggaaagtatttatagacagaatggtcataatggatgacaaataacttaagaaagaattcaaaataatttagggtagtatttaagaaactgcctataatgttattaaatttacaccaatttcaaggtttttggttgtttaaaaaaaaaattcaacaaactaaacttgaaataactttactgtttatagggaacattattacagcagccagacgatcatgcagctactacatcactttcttggaaacgtgtaaaaggatgcaaatctagtgaacagaatggaatggagcaaaagacaattattttaataccctctggttagtttattctttttgaccttgaacatcacaaagacaaaatacatgaaacatttttatttaggagctttaatctaagtgagaatgactttggttccttagcaagattaaaaagtaaagttgtggctgggcgcggtggctcacacctgtaatcccagcactttgggaggccgaggcagccagatcatctgaggtcaggagttggagaccagcctggccaccatggtgaaaccccgtctctactaaaaatacaaaaattagctgggcgtggtggcgggcgcctgtaatcccagctacttgggaggctgaggcatgagaattgcttgaacccggaaggcagaggttgcagtgagccaagatggcaccactgcactccagcctgggcgacaagggtgagactctgcctcaaaaaaaaaaaaaaaaaaaagtacagttgtatttcatgtgatggtcttaatacagagattaacatttcaaggtggagcttttcatttttagtaattttctttgatttctctatgtccatgtgctgtcaatattgatagaagctgaaatttgtgaacttttatgacttcttttttttttttttttttttttgagacagggtctcgctctgttgcccaggcctggagtgcagtggcatgatcatagctcactgcagtctcaaactcctgtgctcaagctcaagcaatcatcctacctcagcctcctgagtagctcgcactacagacatgcctcaccacacccggttgctttttgtagagatggggtctcactatgttgcctaggctggtttcaaactcctggcctcaagtgatcctcctgcctcagcctgtgctaggattacaggcatcagctttgatgcccaccatatttatgcctttttccaaattgttatttctttgtgcctttattgtatcctgtaaacatttctgacacagcaacagtatcactggattatacttactttttaacatagttgtggttttgccaggtaaactaaaaacccttccagaattttgctttattttctatgatacctaacacattgtgggtgtttaataaatattcattgactagatgaatgtatacttaggtatctcttttgtttttcagatttagcatgtagactgctggggcaatcaatggatgaaagtggattaccacagctgaccagttatgattgtgaagttaatgctcctatacaaggcagcagaaacctactgcagggtgaagaattactcagagctttggatcaagttaactgagctttttcttaatttcattcctttttttggacactggtggctcattacctaaagcagtctatttatattttctacatctaattttagaagcctggctacaatactgcacaaacttggttagttcaattttgatcccctttctacttaatttacattaatgctcttttttagtatgttctttaatgctggatcacagacagctcattttctcagttttttggtatttaaaccattgcattgcagtagcatcattttaaaaaatgcacctttttatttatttatttttggctagggagtttatccctttttcgaattatttttaagaagatgccaatataatttttgtaagaaggcagtaacctttcatcatgatcataggcagttgaaaaatttttacaccttttttttcacattttacataaataataatgctttgccagcagtacgtggtagccacaattgcacaatatattttcttaaaaaataccagcagttactcatggaatatattctgcgtttataaaactagtttttaagaagaaattttttttggcctatgaaattgttaaacctggaacatgacattgttaatcatataataatgattcttaaatgctgtatggtttattatttaaatgggtaaagccatttacataatatagaaagatatgcatatatctagaaggtatgtggcatttatttggataaaattctcaattcagagaaatcatctgatgtttctatagtcactttgccagctcaaaagaaaacaataccctatgtagttgtggaagtttatgctaatattgtgtaactgatattaaacctaaatgttctgcctaccctgttggtataaagatattttgagcagactgtaaacaagaaaaaaaaaatcatgcattcttagcaaaattgcctagtatgttaatttgctcaaaatacaatgtttgattttatgcactttgtcgctattaacatcctttttttcatgtagatttcaataattgagtaattttagaagcattattttaggaatatatagttgtcacagtaaatatcttgttttttctatgtacattgtacaaatttttcattccttttgctctttgtggttggatctaacactaactgtattgttttgttacatcaaataaacatcttctgtggaccaggc
